(19) United States
(12) Patent Application Publication
(10) Pub. No.: US 2024/0247242 A1
(43) Pub. Date: Jul. 25, 2024

(54) URACIL STABILIZING PROTEINS AND ACTIVE FRAGMENTS AND VARIANTS THEREOF AND METHODS OF USE

(71) Applicant: LIFEEDIT THERAPEUTICS, INC., Morrisville, NC (US)

(72) Inventors: Tyson D. Bowen, Morrisville, NC (US); Alexandra Briner Crawley, Cary, NC (US); Tedd D. Elich, Durham, NC (US)

(73) Assignee: LIFEEDIT THERAPEUTICS, INC., Morrisville, NC (US)

(21) Appl. No.: 18/005,467

(22) PCT Filed: Jul. 15, 2021
(86) PCT No.: PCT/US2021/041809

§ 371 Date: Jan. 13, 2023

Related U.S. Application Data
(60) Provisional application No. 63/052,175, filed on Jul. 15, 2020.

(51) Int. Cl. C12N 9/22; C07K 14/31; C12N 9/78; C12N 15/10

(52) U.S. Cl. CPC C12N 9/22; C07K 14/31; C12N 9/78; C12N 15/102; C07K 2319/09; C12N 2310/20; C12Y 305/04005

(57) ABSTRACT

Compositions and methods comprising uracil stabilizing polypeptides for targeted editing of nucleic acids are provided. Compositions comprise uracil stabilizing polypeptides. Also provided are fusion proteins comprising i) a DNA-binding polypeptide; ii) a deaminase; and iii) a uracil stabilizing polypeptide (USP). The fusion proteins include RNA-guided nucleases fused to deaminases and further fused to a USP, optionally in complex with guide RNAs. Compositions also include nucleic acid molecules encoding the USPs or the fusion proteins. Vectors and host cells comprising the nucleic acid molecules encoding the USPs or the fusion proteins are also provided.

### CROSS-REFERENCE TO RELATED APPLICATIONS

[0001] This application is a national stage filing under 35 U.S.C. 371 of International Application no. PCT/US2021/041809 filed Jul. 15, 2021, which was published by the International Bureau in English on Jan. 20, 2022, and which claims priority to U.S. Provisional Application No. 63/052,175, filed Jul. 15, 2020, each of which is incorporated by reference herein in its entirety.

### REFERENCE TO A SEQUENCE LISTING SUBMITTED AS AN ASCII TEXT FILE AT USPTO PATENT CENTER

[0002] The application contains a Sequence Listing which is submitted herewith in electronically readable format. The Sequence Listing, created on May 30, 2023, is named L103438 1220US 0155.3 Sequence Listing_ST25.txt and its size is 660,627 bytes. The entire contents of the Sequence Listing are hereby incorporated by reference.

### FIELD OF THE INVENTION

[0003] The present invention relates to the field of molecular biology and gene editing.

### BACKGROUND OF THE INVENTION

[0004] Targeted genome editing or modification is rapidly becoming an important tool for basic and applied research. Initial methods involved engineering nucleases such as meganucleases, zinc finger fusion proteins or TALENs, requiring the generation of chimeric nucleases with engineered, programmable, sequence-specific DNA-binding domains specific for each particular target sequence. RNA-guided nucleases (RGNs), such as the Clustered Regularly Interspaced Short Palindromic Repeats (CRISPR)-associated (Cas) proteins of the CRISPR-Cas bacterial system, allow for the targeting of specific sequences by complexing the nucleases with guide RNA that specifically hybridizes with a particular target sequence. Producing target-specific guide RNAs is less costly and more efficient than generating chimeric nucleases for each target sequence. Such RNA-guided nucleases can be used to edit genomes through the introduction of a sequence-specific, double-stranded break that is repaired via error-prone non-homologous end-joining (NHEJ) to introduce a mutation at a specific genomic location.

[0005] Additionally, RGNs are useful for targeted DNA editing approaches. Targeted editing of nucleic acid sequences, for example targeted cleavage, to allow for introduction of a specific modification into genomic DNA, enables a highly nuanced approach to studying gene function and gene expression. Such targeted editing also may be deployed for targeting genetic diseases in humans or for introducing agronomically beneficial mutations in the genomes of crop plants. The development of genome editing tools provides new approaches to gene editing-based mammalian therapeutics and agrobiotechnology.

### BRIEF SUMMARY OF THE INVENTION

[0006] Compositions and methods for modifying a target DNA molecule are provided. The compositions find use in modifying a target DNA molecule of interest. Compositions provided comprise uracil stabilizing polypeptides. Also provided are fusion proteins comprising a DNA-binding polypeptide, a deaminase polypeptide, and a uracil stabilizing polypeptide. Compositions provided also include nucleic acid molecules encoding the uracil stabilizing polypeptides or the fusion proteins, and vectors and host cells comprising the nucleic acid molecules. The methods disclosed herein are drawn to binding a target sequence of interest within a target DNA molecule of interest and modifying the target DNA molecule of interest.

### DETAILED DESCRIPTION

[0007] Many modifications and other embodiments of the inventions set forth herein will come to mind to one skilled in the art to which these inventions pertain having the benefit of the teachings presented in the foregoing descriptions. Therefore, it is to be understood that the inventions are not to be limited to the specific embodiments disclosed and that modifications and other embodiments are intended to be included within the scope of the appended claims. Although specific terms are employed herein, they are used in a generic and descriptive sense only and not for purposes of limitation.

### I. Overview

[0008] This disclosure provides uracil stabilizing polypeptides (USPs), which stabilize uracil residues in a DNA molecule, and nucleic acid molecules encoding the same.

[0009] Targeted nucleobase editing, also referred to as base editing, was developed by Komor et al. in 2016 using a cytosine deaminase (rAPOBEC1) operably linked to a modified RNA guided nuclease (SpCas9) (Nature 533: 420-424). In the system described by Komor et al., the guide RNA guides the rAPOBEC1-Cas9 fusion protein to the target DNA sequence, where the rAPOBEC1 deaminates a target cytosine (C) to a uracil (U), which has the base-pairing properties of thymine (T). Using this system, targeted C>T mutations could be introduced into a DNA molecule.

[0010] A major drawback for base editing using the rAPOBEC1-Cas9 fusion in vivo was that cellular Uracil DNA Glycosylase (UDG) recognized the U:G heteroduplex DNA and catalyzed the removal of uracil from the DNA to leave an abasic site, thereby initiating base-excision repair with a reversion of the U:G pair to a C:G pair as the most common outcome, although indel (insertion or deletion) formation was also observed. By incorporating a Uracil DNA Glycosylase Inhibitor (UGI) onto the rAPOBEC1-Cas9 fusion protein, the uracil stayed present long enough for replication to occur and introduce the desired C>T mutation.

[0011] The present invention finds that by stabilizing the uracil created by the deaminated cytosine, the creation of the abasic site can be prevented and the desired C>T mutation is more likely to be introduced. This was achieved by the identification of Uracil Stabilizing Proteins (also referred to as Uracil Stabilizing Polypeptides, or USPs).

[0012] In some embodiments, the USP is provided as part of a fusion protein that comprises a DNA-binding polypeptide, a deaminase polypeptide, and a uracil stabilizing polypeptide. In some embodiments, the DNA-binding polypeptide is or is derived from a meganuclease, zinc finger fusion protein, or TALEN. In some embodiments, the DNA-binding polypeptide is an RNA-guided nuclease, such as a Cas9 polypeptide, that binds to a guide RNA (also referred to as gRNA), which, in turn, binds a target nucleic acid sequence via strand hybridization. In other embodiments, the USP is provided alone.

[0013] In some embodiments, the deaminase polypeptide may be a deaminase domain that can deaminate a nucleobase, such as, for example, cytidine. The deamination of a nucleobase by a deaminase can lead to a point mutation at the respective residue, which is referred to herein as “nucleic acid editing”, or “base editing”. Fusion proteins comprising an RNA-guided nuclease (RGN) polypeptide and a deaminase polypeptide can thus be used for the targeted editing of nucleic acid sequences.

[0014] Such fusion proteins are useful for targeted editing of DNA in vitro, e.g., for the generation of mutant cells. These mutant cells may be in plants or animals. Such fusion proteins may also be useful for the introduction of targeted mutations, e.g., for the correction of genetic defects in mammalian cells ex vivo, e.g., in cells obtained from a subject that are subsequently re-introduced into the same or another subject; and for the introduction of targeted mutations in vivo, e.g., the correction of genetic defects or the introduction of deactivating mutations in disease-associated genes in a mammalian subject. Such fusion proteins may also be useful for the introduction of targeted mutations in plant cells, e.g., for the introduction of beneficial or agronomically valuable traits or alleles.

[0015] The terms “protein,” “peptide,” and “polypeptide” are used interchangeably herein, and refer to a polymer of amino acid residues linked together by peptide (amide) bonds. The terms refer to a protein, peptide, or polypeptide of any size, structure, or function. Typically, a protein, peptide, or polypeptide will be at least three amino acids long. A protein, peptide, or polypeptide may refer to an individual protein or a collection of proteins. One or more of the amino acids in a protein, peptide, or polypeptide may be modified, for example, by the addition of a chemical entity such as a carbohydrate group, a hydroxyl group, a phosphate group, a farnesyl group, an isofarnesyl group, a fatty acid group, a linker for conjugation, functionalization, or other modification, etc. A protein, peptide, or polypeptide may also be a single molecule or may be a multi-molecular complex. A protein, peptide, or polypeptide may be just a fragment of a naturally occurring protein or peptide. A protein, peptide, or polypeptide may be naturally occurring, recombinant, or synthetic, or any combination thereof.

[0016] Any of the proteins provided herein may be produced by any method known in the art. For example, the proteins provided herein may be produced via recombinant protein expression and purification, which is especially suited for fusion proteins comprising a peptide linker. Methods for recombinant protein expression and purification are well known, and include those described by Green and Sambrook, Molecular Cloning: A Laboratory Manual (4th ed., Cold Spring Harbor Laboratory Press, Cold Spring Harbor, N.Y. (2012)), the entire contents of which are incorporated herein by reference.

### II. Uracil Stabilizing Proteins

[0017] Novel uracil-stabilizing polypeptides (USPs) are presently disclosed and set forth as SEQ ID NOs: 1-16. The USPs described herein are useful in applications where stabilizing a uracil in a DNA molecule is desired.

[0018] As used herein, the terms “uracil stabilizing protein,” “uracil stabilizing polypeptide,” and “USPs” refer to a polypeptide having uracil stabilizing activity. As used herein, the term “uracil stabilizing activity” refers to the ability of a molecule (e.g., polypeptide) to increase the mutation rate of at least one cytidine, deoxycytidine, or cytosine to a thymidine, deoxythymidine, or thymine in a nucleic acid molecule by a deaminase compared to the mutation rate by the deaminase in the absence of the molecule (e.g., uracil stabilizing polypeptide). Without being bound by a theory or mechanism of action, it is believed that the presently disclosed USPs may function by maintaining the presence of uracil in single-stranded DNA that has been generated through the deamination of a cytidine, deoxycytidine, or cytosine base for a sufficient period of time to allow for replication to occur and introduce the desired C>T mutation. Uracil stabilizing activity may occur through inhibition of uracil DNA glycosylase, the base excision repair pathway, or mis-match repair mechanisms.

[0019] In some embodiments, the presently disclosed USPs or active variants or fragments thereof that retain uracil stabilizing activity increase the mutation rate of at least one cytidine, deoxycytidine, or cytosine to a thymidine, deoxythymidine, or thymine in a nucleic acid molecule by a deaminase by at least 10%, at least 15%, at least 20%, at least 25%, at least 30%, at least 35%, at least 40%, at least 45%, at least 50%, at least 55%, at least 60%, at least 70%, at least 80%, at least 90%, at least 95%, at least 96%, at least 97%, at least 98%, at least 99%, at least 100%, at least 150%, at least 200%, or more compared to the mutation rate by a deaminase in the absence of the USP. Conversely, the mutation rate of at least one cytidine, deoxycytidine, or cytosine to any nucleobase other than thymidine, deoxythymidine, or thymine (i.e., guanosine, deoxyguanosine, guanine, adenosine, deoxyadenosine, adenine) in a nucleic acid molecule by a deaminase is reduced by the presently disclosed USPs or active variants or fragments thereof by at least 10%, at least 15%, at least 20%, at least 25%, at least 30%, at least 35%, at least 40%, at least 45%, at least 50%, at least 55%, at least 60%, at least 70%, at least 80%, at least 90%, at least 95%, at least 96%, at least 97%, at least 98%, at least 99%, or more compared to the mutation rate by a deaminase in the absence of the USP. An increase or decrease in the mutation rate of a cytidine, deoxycytidine, or cytosine to another nucleobase can be measured by comparing the rate of mutation of a particular deaminase to a particular nucleobase in the presence or absence of the USP. In those embodiments wherein the deaminase has been targeted to a specific region of a nucleic acid molecule via fusion with a DNA-binding polypeptide, the mutation rate of cytidines, deoxycytidines, or cytosines within or adjacent to the target sequence to which the DNA-binding polypeptide binds can be measured using any method known in the art, including polymerase chain reaction (PCR), restriction fragment length polymorphism (RFLP), or DNA sequencing.

[0020] The presently disclosed novel USPs or active variants or fragments thereof that retain uracil stabilizing activity may be introduced into the cell as part of a deaminase-DNA-binding polypeptide fusion, and/or may be co-expressed with a DNA-binding polypeptide-deaminase fusion or with a DNA-binding polypeptide-deaminase-USP fusion, to increase the efficiency of introducing the desired C>T mutation in a target DNA molecule. The presently disclosed USPs retaining uracil stabilizing activity have the amino acid sequence of any of SEQ ID NOs: 1-16 or a variant or fragment thereof. In some embodiments, the USP has an amino acid sequence having at least 50%, at least 55%, at least 60%, at least 65%, at least 70%, at least 75%, at least 80%, at least 81%, at least 82%, at least 83%, at least 84%, at least 85%, at least 86%, at least 87%, at least 88%, at least 89%, at least 90%, at least 91%, at least 92%, at least 93%, at least 94%, at least 95%, at least 96%, at least 97%, at least 98%, or at least 99% identity to the amino acid sequence of any of SEQ ID NOs: 1-16. In particular embodiments, the USP comprises an amino acid sequence having at least 80% sequence identity to any one of SEQ ID NOs: 1, 2, 4, 5, and 7-15. In other embodiments, the USP comprises an amino acid sequence having at least 81% sequence identity to SEQ ID NO: 3 or 16. In still other embodiments, the USP comprises an amino acid sequence having at least 82% sequence identity to SEQ ID NO: 6.

### III. Fusion Proteins

[0021] Some aspects of this disclosure provide fusion proteins that comprise a DNA-binding polypeptide and a deaminase polypeptide, and in some embodiments, a USP polypeptide. Such fusion proteins are useful for targeted editing of DNA in vitro, ex vivo, or in vivo.

[0022] The term “fusion protein” as used herein refers to a hybrid polypeptide which comprises protein domains from at least two different proteins. A fusion protein may comprise different domains, for example, a DNA-binding domain and a deaminase. In some embodiments, a fusion protein is in a complex with, or is in association with, a nucleic acid, e.g., RNA.

[0023] The deaminase polypeptide comprises a deaminase domain that can deaminate a nucleobase, such as, for example, cytidine. The deamination of a nucleobase by a deaminase can lead to a point mutation at the respective residue, which is referred to herein as “nucleic acid editing” or “base editing”. Fusion proteins comprising an RGN polypeptide variant or domain and a deaminase domain can thus be used for the targeted editing of nucleic acid sequences. In some embodiments, a deaminase comprises an amino acid sequence at least 80%, at least 81%, at least 82%, at least 83%, at least 84%, at least 85%, at least 86%, at least 87%, at least 88%, at least 89%, at least 90%, at least 91%, at least 92%, at least 93%, at least 94%, at least 95%, at least 96%, at least 97%, at least 98%, at least 99%, or more identical to any one of SEQ ID NOs 47, 48 and 76-94. In some embodiments, a deaminase comprises an amino acid sequence at least 80% identical to any one of SEQ ID NOs 47, 48 and 76-94. In some embodiments, a deaminase comprises an amino acid sequence at least 85% identical to any one of SEQ ID NOs 47, 48 and 76-94. In some embodiments, a deaminase comprises an amino acid sequence at least 90% identical to any one of SEQ ID NOs 47, 48 and 76-94. In some embodiments, a deaminase comprises an amino acid sequence at least 95% identical to any one of SEQ ID NOs 47, 48 and 76-94. In other embodiments, a deaminase comprises an amid acid sequence at least 99% identical to any one of SEQ ID NOs 47, 48 and 76-94. In some specific embodiments, a deaminase comprises an amino acid sequence as set forth in any one of SEQ ID NOs 47, 48 and 76-94.

[0024] The presently disclosed fusion proteins comprise a DNA-binding polypeptide. As used herein, the term “DNA-binding polypeptide” refers to any polypeptide which is capable of binding to DNA. In certain embodiments, the DNA-binding polypeptide portion of the presently disclosed fusion proteins binds to double-stranded DNA. In particular embodiments, the DNA-binding polypeptide binds to DNA in a sequence-specific manner. As used herein, the terms “sequence-specific” or “sequence-specific manner” refer to the selective interaction with a specific nucleotide sequence.

[0025] Two polynucleotide sequences can be considered to be substantially complementary when the two sequences hybridize to each other under stringent conditions. Likewise, a DNA-binding polypeptide is considered to bind to a particular target sequence in a sequence-specific manner if the DNA-binding polypeptide binds to its sequence under stringent conditions. By “stringent conditions” or “stringent hybridization conditions” is intended conditions under which the two polynucleotide sequences (or the polypeptide binds to its specific target sequence) will bind to each other to a detectably greater degree than to other sequences (e.g., at least 2-fold over background). Stringent conditions are sequence-dependent and will be different in different circumstances. Typically, stringent conditions will be those in which the salt concentration is less than about 1.5 M Na ion, typically about 0.01 to 1.0 M Na ion concentration (or other salts) at pH 7.0 to 8.3, and the temperature is at least about 30° C. for short sequences (e.g., 10 to 50 nucleotides) and at least about 60° C. for long sequences (e.g., greater than 50 nucleotides). Stringent conditions may also be achieved with the addition of destabilizing agents such as formamide. Exemplary low stringency conditions include hybridization with a buffer solution of 30 to 35% formamide, 1 M NaCl, 1% SDS (sodium dodecyl sulfate) at 37° C., and a wash in 1X to 2X SSC (20X SSC =3.0 M NaCl/0.3 M trisodium citrate) at 50 to 55° C. Exemplary moderate stringency conditions include hybridization in 40 to 45% formamide, 1.0 M NaCl, 1% SDS at 37° C., and a wash in 0.5X to 1X SSC at 55 to 60° C. Exemplary high stringency conditions include hybridization in 50% formamide, 1 M NaCl, 1% SDS at 37° C., and a wash in 0.1X SSC at 60 to 65° C. Optionally, wash buffers may comprise about 0.1% to about 1% SDS. Duration of hybridization is generally less than about 24 hours, usually about 4 to about 12 hours. The duration of the wash time will be at least a length of time sufficient to reach equilibrium. The Tm is the temperature (under defined ionic strength and pH) at which 50% of a complementary target sequence hybridizes to a perfectly matched sequence. For DNA-DNA hybrids, the Tm can be approximated from the equation of Meinkoth and Wahl (1984) Anal. Biochem. 138:267-284: Tm=81.5° C.+16.6 (log M)+0.41 (% GC)−0.61 (% form)−500/L; where M is the molarity of monovalent cations, % GC is the percentage of guanosine and cytosine nucleotides in the DNA, % form is the percentage of formamide in the hybridization solution, and L is the length of the hybrid in base pairs. Generally, stringent conditions are selected to be about 5° C. lower than the thermal melting point (Tm) for the specific sequence and its complement at a defined ionic strength and pH. However, severely stringent conditions can utilize a hybridization and/or wash at 1, 2, 3, or 4° C. lower than the thermal melting point (Tm); moderately stringent conditions can utilize a hybridization and/or wash at 6, 7, 8, 9, or 10° C. lower than the thermal melting point (Tm); low stringency conditions can utilize a hybridization and/or wash at 11, 12, 13, 14, 15, or 20° C. lower than the thermal melting point (Tm). Using the equation, hybridization and wash compositions, and desired Tm, those of ordinary skill will understand that variations in the stringency of hybridization and/or wash solutions are inherently described. An extensive guide to the hybridization of nucleic acids is found in Tijssen (1993) Laboratory Techniques in Biochemistry and Molecular Biology—Hybridization with Nucleic Acid Probes, Part I, Chapter 2 (Elsevier, New York); and Ausubel et al., eds. (1995) Current Protocols in Molecular Biology, Chapter 2 (Greene Publishing and Wiley-Interscience, New York). See Sambrook et al. (1989) Molecular Cloning: A Laboratory Manual (2d ed., Cold Spring Harbor Laboratory Press, Plainview, New York).

[0026] In certain embodiments, the sequence-specific DNA-binding polypeptide is an RNA-guided, DNA-binding polypeptide (RGDBP). As used herein, the terms “RNA-guided, DNA-binding polypeptide” and “RGDBP” refer to polypeptides capable of binding to DNA through the hybridization of an associated RNA molecule with the target DNA sequence.

[0027] In some embodiments, the DNA-binding polypeptide of the fusion protein is a nuclease, such as a sequence-specific nuclease. As used herein, the term “nuclease” refers to an enzyme that catalyzes the cleavage of phosphodiester bonds between nucleotides in a nucleic acid molecule. In some embodiments, the DNA-binding polypeptide is an endonuclease, which is capable of cleaving phosphodiester bonds between nucleotides within a nucleic acid molecule, whereas in other embodiments, the DNA-binding polypeptide is an exonuclease that is capable of cleaving the nucleotides at either end (5′ or 3′) of a nucleic acid molecule. In some embodiments, the sequence-specific nuclease is selected from the group consisting of a meganuclease, a zinc finger nuclease, a TAL-effector DNA binding domain-nuclease fusion protein (TALEN), and an RNA-guided nuclease (RGN) or variants thereof wherein the nuclease activity has been reduced or inhibited.

[0028] As used herein, the term “meganuclease” or “homing endonuclease” refers to endonucleases that bind a recognition site within double-stranded DNA that is 12 to 40 bp in length. Non-limiting examples of meganucleases are those that belong to the LAGLIDADG family that comprise the conserved amino acid motif LAGLIDADG (SEQ ID NO: 75). The term “meganuclease” can refer to a dimeric or single-chain meganuclease.

[0029] As used herein, the term “zinc finger nuclease” or “ZFN” refers to a chimeric protein comprising a zinc finger DNA-binding domain and a nuclease domain.

[0030] As used herein, the term “TAL-effector DNA binding domain-nuclease fusion protein” or “TALEN” refers to a chimeric protein comprising a TAL effector DNA-binding domain and a nuclease domain.

[0031] As used herein, the term “RNA-guided nuclease” or “RGN” refers to an RNA-guided, DNA-binding polypeptide that has nuclease activity. RGNs are considered “RNA-guided” because guide RNAs form a complex with the RNA-guided nucleases to direct the RNA-guided nuclease to bind to a target sequence and in some embodiments, introduce a single-stranded or double-stranded break at the target sequence.

[0032] Non-limiting examples of RGNs useful in the presently disclosed compositions and methods include those disclosed in Publication Nos. WO 2020/139783, WO 2019/236566, WO 2021/030344, WO/2021/138247, and Application Nos. PCT/US2021/028843 and PCT/US2021/031794, filed Apr. 23, 2021 and May 11, 2021, respectively, each of which is herein incorporated by reference in its entirety. In some embodiments, a presently disclosed fusion protein comprises an RGN comprising an amino acid sequence at least 80%, at least 81%, at least 82%, at least 83%, at least 84%, at least 85%, at least 86%, at least 87%, at least 88%, at least 89%, at least 90%, at least 91%, at least 92%, at least 93%, at least 94%, at least 95%, at least 96%, at least 97%, at least 98%, at least 99%, or more identical to any one of SEQ ID NOs: 40 and 95-142. In some embodiments, a presently disclosed fusion protein comprises an RGN having an amino acid sequence at least 80% identical to any one of SEQ ID NOs: 40 and 95-142. In some embodiments, a presently disclosed fusion protein comprises an RGN having an amino acid sequence at least 85% identical to any one of SEQ ID NOs: 40 and 95-142. In some embodiments, a presently disclosed fusion protein comprises an RGN having an amino acid sequence at least 90% identical to any one of SEQ ID NOs: 40 and 95-142. In some embodiments, a presently disclosed fusion protein comprises an RGN having an amino acid sequence at least 95% identical to any one of SEQ ID NOs: 40 and 95-142. In other embodiments, a presently disclosed fusion protein comprises an RGN having an amid acid sequence at least 99% identical to any one of SEQ ID NOs: 40 and 95-142. In some specific embodiments, a presently disclosed fusion protein comprises an RGN having an amino acid sequence as set forth in any one of SEQ ID NOs: 40 and 95-142.

[0033] According to the present invention, an RGN protein that has been mutated to become nuclease-inactive or “dead”, such as for example dCas9, is herein referred to as an RNA-guided, DNA-binding polypeptide. One exemplary suitable nuclease-inactive Cas9 domain is the D10A/H840A Cas9 domain mutant (see, e.g., Qi et al., Cell. 2013; 152(5): 1173-83, the entire contents of which are incorporated herein by reference). Additionally, suitable nuclease-inactive Cas9 domains of other known RNA guided nucleases (RGNs) can be determined (for example, a nuclease-inactive variant of the RGN APG08290.1 disclosed in U.S. Patent Publication No. 2019/0367949, the entire contents of which are incorporated herein by reference herein).

[0034] The term “RGN polypeptide” encompasses RGN polypeptides that only cleave a single strand of a target nucleotide sequence, which is referred to herein as a nickase. Such RGNs have a single functioning nuclease domain. RGN nickases can be naturally-occurring nickases or can be RGN proteins that naturally cleave both strands of a double-stranded nucleic acid molecule that has been mutated within additional nuclease domains such that the nuclease activity of these mutated domains is reduced or eliminated, to become a nickase. In some embodiments, the nickase RGN of the fusion protein comprises a DlOA mutation (for example nAPG07433.1 (SEQ ID NO: 41)) which renders the RGN capable of cleaving only the non-base edited, target strand (the strand which comprises the PAM and is base paired to a gRNA) of a nucleic acid duplex. In some embodiments, the nickase RGN of the fusion protein comprises a DlOA mutation or an equivalent mutation thereof in any one of SEQ ID NOs: 40 and 95-142. In some embodiments, the nickase RGN of the fusion protein comprises a H840A mutation, which renders the RGN capable of cleaving only the base-edited, non-target strand (the strand which does not comprise the PAM and is not base paired to a gRNA) of a nucleic acid duplex. A nickase RGN comprising an H840A mutation, or an equivalent mutation, has an inactivated HNH domain. A nickase RGN comprising a DlOA mutation, or an equivalent mutation, has an inactivated RuvC domain. The deaminase acts on the non-target strand. A nickase comprising a DlOA mutation, or an equivalent mutation, has an inactive RuvC nuclease domain and is not able to cleave the non-targeted strand of the DNA, i.e., the strand where base editing is desired.

[0035] Other additional exemplary suitable nuclease inactive Cas9 domains include, but are not limited to, D10A/D839A/H840A, and D10A/D839A/H840A/N863A mutant domains (See, e.g., Mali et al., Nature Biotechnology. 2013; 31(9): 833-838, the entire contents of which are incorporated herein by reference). Additional suitable RGN proteins mutated to be nickases will be apparent to those of skill in the art based on this disclosure and knowledge in the field (such as for example the RGNs disclosed in PCT Publication No. WO 2019/236566) and are within the scope of this disclosure.

[0036] In some embodiments the RGN nickase retaining nickase activity comprises an amino acid sequence that is at least 60%, at least 65%, at least 70%, at least 75%, at least 80%, at least 85%, at least 90%, at least 95%, at least 96%, at least 97%, at least 98%, at least 99%, or at least 99.5% identical to nAPG07433.1 (SEQ ID NO: 41).

[0037] Any method known in the art for introducing mutations into an amino acid sequence, such as PCR-mediated mutagenesis and site-directed mutagenesis, can be used for generating nickases or nuclease-dead RGNs. See, e.g., U.S. Publ. No. 2014/0068797 and U.S. Pat. No. 9,790,490; each of which is incorporated by reference in its entirety. RNA-guided nucleases (RGNs) allow for the targeted manipulation of a single site within a genome and are useful in the context of gene targeting for therapeutic and research applications.

[0038] In a variety of organisms, including mammals, RNA-guided nucleases have been used for genome engineering by stimulating either non-homologous end joining or homologous recombination. RGNs include CRISPR-Cas proteins, which are RNA-guided nucleases directed to the target sequence by a guide RNA (gRNA) as part of a Clustered Regularly Interspaced Short Palindromic Repeats (CRISPR) RNA-guided nuclease system, or active variants or fragments thereof.

[0039] Some aspects of this disclosure provide fusion proteins that comprise an RNA-guided DNA-binding polypeptide, a deaminase polypeptide, and a USP. In some embodiments, the RNA-guided DNA-binding polypeptide is an RNA-guided nuclease. In further embodiments, the RNA-guided nuclease is a naturally-occurring CRISPR-Cas protein or an active variant or fragment thereof. CRISPR-Cas systems are classified into Class I or Class II systems. Class II systems comprise a single effector nuclease and include Types II, V, and VI. Each class is subdivided into types (Types I, II, III, IV, V, VI), with some types further divided into subtypes (e.g., Type II-A, Type II-B, Type II-C, Type V-A, Type V-B).

[0040] In certain embodiments, the CRISPR-Cas protein is a naturally-occurring Type II CRISPR-Cas protein or an active variant or fragment thereof As used herein, the term “Type II CRISPR-Cas protein,” “Type II CRISPR-Cas effector protein,” or “Cas9” refers to a CRISPR-Cas effector protein that requires a trans-activating RNA (tracrRNA) and comprises two nuclease domains (RuvC and HNH), each of which is responsible for cleaving a single strand of a double-stranded DNA molecule.

[0041] In other embodiments, the CRISPR-Cas protein is a naturally-occurring Type V CRISPR-Cas protein or an active variant or fragment thereof As used herein, the term “Type V CRISPR-Cas protein,” “Type V CRISPR-Cas effector protein,” or “Cas12” refers to a CRISPR-Cas effector protein that cleaves dsDNA and comprises a single RuvC nuclease domain or a split-RuvC nuclease domain and lacks an HNH domain (Zetsche et al 2015, Cell doi:10.1016/j.ce11.2015.09.038; Shmakov et al 2017, Nat Rev Microbiol doi:10.1038/nrmicro.2016.184; Yan et al 2018, Science doi:10.1126/science.aav7271; Harrington et al 2018, Science doi:10.1126/science.aav4294). It is to be noted that Cas12a is also referred to as Cpfl, and does not require a tracrRNA, although other Type V CRISPR-Cas proteins, such as Cas12b, do require a tracrRNA. Most Type V effectors can also target ssDNA (single-stranded DNA), often without a PAM requirement (Zetsche et al 2015; Yan et al 2018; Harrington et al 2018). The term “Type V CRISPR-Cas protein” encompasses the unique RGNs comprising split RuvC nuclease domains, such as those disclosed in U.S. Provisional Appl. No. 62/955,014 filed Dec. 30, 2019, the contents of which are incorporated by reference in its entirety.

[0042] In still other embodiments, the CRISPR-Cas protein is a naturally-occurring Type VI CRISPR-Cas protein or an active variant or fragment thereof As used herein, the term “Type VI CRISPR-Cas protein,” “Type VI CRISPR-Cas effector protein,” or “Cas13” refers to a CRISPR-Cas effector proteins that do not require a tracrRNA and comprise two HEPN domains that cleave RNA.The term “guide RNA” refers to a nucleotide sequence having sufficient complementarity with a target nucleotide sequence to hybridize with the target sequence and direct sequence-specific binding of an associated RGN to the target nucleotide sequence. For CRISPR-Cas RGNs, the respective guide RNA is one or more RNA molecules (generally, one or two), that can bind to the RGN and guide the RGN to bind to a particular target nucleotide sequence, and in those instances wherein the RGN has nickase or nuclease activity, also cleave the target nucleotide sequence. A guide RNA comprises a CRISPR RNA (crRNA) and in some embodiments, a trans-activating CRISPR RNA (tracrRNA).

[0043] A CRISPR RNA comprises a spacer sequence and a CRISPR repeat sequence. The “spacer sequence” is the nucleotide sequence that directly hybridizes with the target nucleotide sequence of interest. The spacer sequence is engineered to be fully or partially complementary with the target sequence of interest. In various embodiments, the spacer sequence can comprise from about 8 nucleotides to about 30 nucleotides, or more. For example, the spacer sequence can be about 8, about 9, about 10, about 11, about 12, about 13, about 14, about 15, about 16, about 17, about 18, about 19, about 20, about 21, about 22, about 23, about 24, about 25, about 26, about 27, about 28, about 29, about 30, or more nucleotides in length. In some embodiments, the spacer sequence is about 10 to about 26 nucleotides in length, or about 12 to about 30 nucleotides in length. In particular embodiments, the spacer sequence is about 30 nucleotides in length.

[0044] In some embodiments, the degree of complementarity between a spacer sequence and its corresponding target sequence, when optimally aligned using a suitable alignment algorithm, is about or more than about 50%, about 60%, about 70%, about 75%, about 80%, about 81%, about 82%, about 83%, about 84%, about 85%, about 86%, about 87%, about 88%, about 89%, about 90%, about 91%, about 92%, about 93%, about 94%, about 95%, about 96%, about 97%, about 98%, about 99%, or more. In particular embodiments, the spacer sequence is free of secondary structure, which can be predicted using any suitable polynucleotide folding algorithm known in the art, including but not limited to mFold (see, e.g., Zuker and Stiegler (1981) Nucleic Acids Res. 9:133-148) and RNAfold (see, e.g., Gruber et al. (2008) Cell 106(1):23-24).

[0045] The CRISPR RNA repeat sequence comprises a nucleotide sequence that forms a structure, either on its own or in concert with a hybridized tracrRNA, that is recognized by the RGN molecule. In various embodiments, the CRISPR RNA repeat sequence can comprise from about 8 nucleotides to about 30 nucleotides, or more. For example, the CRISPR repeat sequence can be about 8, about 9, about 10, about 11, about 12, about 13, about 14, about 15, about 16, about 17, about 18, about 19, about 20, about 21, about 22, about 23, about 24, about 25, about 26, about 27, about 28, about 29, about 30, or more nucleotides in length. In some embodiments, the degree of complementarity between a CRISPR repeat sequence and its corresponding tracrRNA sequence, when optimally aligned using a suitable alignment algorithm, is about or more than about 50%, about 60%, about 70%, about 75%, about 80%, about 81%, about 82%, about 83%, about 84%, about 85%, about 86%, about 87%, about 88%, about 89%, about 90%, about 91%, about 92%, about 93%, about 94%, about 95%, about 96%, about 97%, about 98%, about 99%, or more.

[0046] In some embodiments, the guide RNA further comprises a tracrRNA molecule. A trans-activating CRISPR RNA or tracrRNA molecule comprises a nucleotide sequence comprising a region that has sufficient complementarity to hybridize to a CRISPR repeat sequence of a crRNA, which is referred to herein as the anti-repeat region. In some embodiments, the tracrRNA molecule further comprises a region with secondary structure (e.g., stem-loop) or forms secondary structure upon hybridizing with its corresponding crRNA. In particular embodiments, the region of the tracrRNA that is fully or partially complementary to a CRISPR repeat sequence is at the 5′ end of the molecule and the 3′ end of the tracrRNA comprises secondary structure. This region of secondary structure generally comprises several hairpin structures, including the nexus hairpin, which is found adjacent to the anti-repeat sequence. There are often terminal hairpins at the 3′ end of the tracrRNA that can vary in structure and number, but often comprise a GC-rich Rho-independent transcriptional terminator hairpin followed by a string of Us at the 3′ end. See, for example, Briner et al. (2014) Molecular Cell 56:333-339, Briner and Barrangou (2016) Cold Spring Harb Protoc; doi: 10.1101/pdb.top090902, and U.S. Publication No. 2017/0275648, each of which is herein incorporated by reference in its entirety.

[0047] In various embodiments, the anti-repeat region of the tracrRNA that is fully or partially complementary to the CRISPR repeat sequence comprises from about 6 nucleotides to about 30 nucleotides, or more. For example, the region of base pairing between the tracrRNA anti-repeat sequence and the CRISPR repeat sequence can be about 6, about 7, about 8, about 9, about 10, about 11, about 12, about 13, about 14, about 15, about 16, about 17, about 18, about 19, about 20, about 21, about 22, about 23, about 24, about 25, about 26, about 27, about 28, about 29, about 30, or more nucleotides in length. In particular embodiments, the anti-repeat region of the tracrRNA that is fully or partially complementary to a CRISPR repeat sequence is about 10 nucleotides in length. In some embodiments, the degree of complementarity between a CRISPR repeat sequence and its corresponding tracrRNA anti-repeat sequence, when optimally aligned using a suitable alignment algorithm, is about or more than about 50%, about 60%, about 70%, about 75%, about 80%, about 81%, about 82%, about 83%, about 84%, about 85%, about 86%, about 87%, about 88%, about 89%, about 90%, about 91%, about 92%, about 93%, about 94%, about 95%, about 96%, about 97%, about 98%, about 99%, or more.

[0048] In various embodiments, the entire tracrRNA can comprise from about 60 nucleotides to more than about 210 nucleotides. For example, the tracrRNA can be about 60, about 65, about 70, about 75, about 80, about 85, about 90, about 95, about 100, about 105, about 110, about 115, about 120, about 125, about 130, about 135, about 140, about 150, about 160, about 170, about 180, about 190, about 200, about 210 or more nucleotides in length. In particular embodiments, the tracrRNA is about 100 to about 201 nucleotides in length, including about 95, about 96, about 97, about 98, about 99, about 100, about 105, about 106, about 107, about 108, about 109, and about 100 nucleotides in length.

[0049] Guide RNAs form a complex with the RNA-guided nucleases to direct the RNA-guided nuclease to bind to a target sequence and introduce a single-stranded or double-stranded break at the target sequence. After the target sequence has been cleaved, the break can be repaired such that the DNA sequence of the target sequence is modified during the repair process. Provided herein are methods for using mutant variants of RNA-guided nucleases, which are either nuclease inactive or nickases, which are linked to deaminases to modify a target sequence in the DNA of host cells. The mutant variants of RNA-guided nucleases in which the nuclease activity is inactivated or significantly reduced may be referred to as RNA-guided, DNA-binding polypeptides, as the polypeptides are capable of binding to, but not necessarily cleaving, a target sequence. RNA-guided nucleases only capable of cleaving a single strand of a double-stranded nucleic acid molecule are referred to herein as nickases.

[0050] A target nucleotide sequence is bound by an RGN and hybridizes with the guide RNA associated with the RGN. The target sequence can then be subsequently cleaved by the RGN if the polypeptide possesses nuclease activity, which encompasses activity as a nickase.

[0051] The guide RNA can be a single guide RNA or a dual-guide RNA system. A single guide RNA comprises the crRNA and optionally tracrRNA on a single molecule of RNA, whereas a dual-guide RNA system comprises a crRNA and a tracrRNA present on two distinct RNA molecules, hybridized to one another through at least a portion of the CRISPR repeat sequence of the crRNA and at least a portion of the tracrRNA, which may be fully or partially complementary to the CRISPR repeat sequence of the crRNA. In some of those embodiments wherein the guide RNA is a single guide RNA, the crRNA and optionally tracrRNA are separated by a linker nucleotide sequence.

[0052] In general, the linker nucleotide sequence is one that does not include complementary bases in order to avoid the formation of secondary structure within or comprising nucleotides of the linker nucleotide sequence. In some embodiments, the linker nucleotide sequence between the crRNA and tracrRNA is at least 3, at least 4, at least 5, at least 6, at least 7, at least 8, at least 9, at least 10, at least 11, at least 12, or more nucleotides in length. In particular embodiments, the linker nucleotide sequence of a single guide RNA is at least 4 nucleotides in length.

[0053] In certain embodiments, the guide RNA can be introduced into a target cell, organelle, or embryo as an RNA molecule. The guide RNA can be transcribed in vitro or chemically synthesized. In other embodiments, a nucleotide sequence encoding the guide RNA is introduced into the cell, organelle, or embryo. In some of these embodiments, the nucleotide sequence encoding the guide RNA is operably linked to a promoter (e.g., an RNA polymerase III promoter). The promoter can be a native promoter or heterologous to the guide RNA-encoding nucleotide sequence.

[0054] In various embodiments, the guide RNA can be introduced into a target cell, organelle, or embryo as a ribonucleoprotein complex, as described herein, wherein the guide RNA is bound to an RNA-guided nuclease polypeptide.

[0055] The guide RNA directs an associated RNA-guided nuclease to a particular target nucleotide sequence of interest through hybridization of the guide RNA to the target nucleotide sequence. A target nucleotide sequence can comprise DNA, RNA, or a combination of both and can be single-stranded or double-stranded. A target nucleotide sequence can be genomic DNA (i.e., chromosomal DNA), plasmid DNA, or an RNA molecule (e.g., messenger RNA, ribosomal RNA, transfer RNA, micro RNA, small interfering RNA). The target nucleotide sequence can be bound (and in some embodiments, cleaved) by an RNA-guided nuclease in vitro or in a cell. The chromosomal sequence targeted by the RGN can be a nuclear, plastid or mitochondrial chromosomal sequence. In some embodiments, the target nucleotide sequence is unique in the target genome.

[0056] In some embodiments, the target nucleotide sequence is adjacent to a protospacer adjacent motif (PAM). A PAM is generally within about 1 to about 10 nucleotides from the target nucleotide sequence, including about 1, about 2, about 3, about 4, about 5, about 6, about 7, about 8, about 9, or about 10 nucleotides from the target nucleotide sequence. The PAM can be 5′ or 3′ of the target sequence. In some embodiments, the PAM is 3′ of the target sequence. Generally, the PAM is a consensus sequence of about 2-6 nucleotides, but in particular embodiments, can be 1, 2, 3, 4, 5, 6, 7, 8, 9, or more nucleotides in length. Upon recognizing its corresponding PAM sequence, the RGN can cleave the target nucleotide sequence at a specific cleavage site. As used herein, a cleavage site is made up of the two particular nucleotides within a target nucleotide sequence between which the nucleotide sequence is cleaved by an RGN. The cleavage site can comprise the 1^{st} and 2^{nd}, and 3^{rd}, 3^{rd} and 4^{th}, 4^{th} and 5^{th}, 5^{th} and 6^{th}, 7^{th} and 8^{th}, or 8^{th} and 9^{th} nucleotides from the PAM in either the 5′ or 3′ direction. As RGNs can cleave a target nucleotide sequence resulting in staggered ends, in some embodiments, the cleavage site is defined based on the distance of the two nucleotides from the PAM on the positive (+) strand of the polynucleotide and the distance of the two nucleotides from the PAM on the negative (−) strand of the polynucleotide.

[0057] RGNs can be used to deliver a fused polypeptide, polynucleotide, or small molecule payload to a particular genomic location. In some embodiments, a nuclease-inactive or a nickase RGN is operably linked to a deaminase and also to a USP of the invention.

[0058] As used herein, the term “deaminase” or “deaminase polypeptide” refers to a polypeptide that catalyzes a deamination reaction. The deaminase may be a naturally-occurring deaminase enzyme or an active fragment or variant thereof. In some embodiments, the deaminase is a cytidine deaminase, catalyzing the hydrolytic deamination of cytidine or deoxycytidine to uracil or deoxyuracil, respectively. Cytidine deaminases may work on either DNA or RNA, and typically operate on single-stranded nucleic acid molecules. In preferred embodiments, an RGN which has nickase activity on the target strand nicks the target strand, while the complementary, non-target strand is modified by the deaminase. Cellular DNA-repair machinery may repair the nicked, target strand using the modified non-target strand as a template, thereby introducing a mutation in the DNA.

[0059] In some embodiments, the cytidine deaminase is an apolipoprotein B mRNA-editing complex (APOBEC) family deaminase. In some of these embodiments, the deaminase is an APOBEC1 family deaminase. In some embodiments, the cytidine deaminase is an activation-induced cytidine deaminase (AID). In some embodiments, the deaminase is an ACF1/ASE deaminase. In certain embodiments, the deaminase is an adenosine deaminase. In some of these embodiments, the deaminase is an ADAT family deaminase. Additional suitable deaminase enzymes or domains will be apparent to the skilled artisan based on this disclosure.

[0060] One exemplary suitable type of deaminase polypeptides are cytidine deaminases, for example, of the APOBEC family. The apolipoprotein B mRNA editing complex (APOBEC) family of cytosine deaminase enzymes encompasses eleven proteins that serve to initiate mutagenesis in a controlled and beneficial manner (Conticello et al., 2008. Genome Biology, 9(6): 229). One family member, activation-induced cytidine deaminase (AID), is responsible for the maturation of antibodies by converting cytosines in ssDNA to uracils in a transcription-dependent, strand-biased fashion (Reynaud et al., 2003. Nature Immunology, 4(7): 631-638). The apolipoprotein B editing complex 3 (APOBEC3) enzyme provides protection to human cells against a certain HIV-1 strain via the deamination of cytosines in reverse-transcribed viral ssDNA (Bhagwat et al., 2004. DNA Repair (Amst), 3(1): 85-9). These proteins all require a Zn²⁺-coordinating motif (HisX- Glu-X₂₃₋₂₆-Pro-Cys-X₂₋₄-Cys) and bound water molecule for catalytic activity. The Glu residue acts to activate the water molecule to a zinc hydroxide for nucleophilic attack in the deamination reaction. Each family member preferentially deaminates at its own particular “hotspot”, ranging from WRC (wherein W is A or T and R is A or G) for hAID, to TTC for hAPOBEC3F (Navaratnam et al., 2006. Intl J Hematol 83(3): 195-200). A recent crystal structure of the catalytic domain of APOBEC3G revealed a secondary structure comprised of a five-stranded β-sheet core flanked by six a-helices, which is believed to be conserved across the entire family (Holden et al., 2008. Nature 456(7218): 121-124). The active center loops have been shown to be responsible for both ssDNA binding and in determining “hotspot” identity (Chelico et al., 2009. JBiol Chem 284(41): 27761-27765). Overexpression of these enzymes has been linked to genomic instability and cancer, thus highlighting the importance of sequence-specific targeting (Pham et al., 2005. Biochem 44(8): 2703-2715). In some embodiments, the deaminase polypeptide may be a deaminase polypeptide that can deaminate a cytidine to yield a uracil. The deamination of a nucleobase by a deaminase can lead to a point mutation at the respective residue, thereby modifying the DNA molecule. This act of modification is also referred to herein as nucleic acid editing, or base editing. Fusion proteins comprising a Cas9 variant or domain, a deaminase domain, and a USP domain can thus be used for the targeted editing of nucleic acid sequences.

[0061] In some embodiments, a nuclease inactive RGN or nickase RGN fused to a deaminase and an USP of the invention can be targeted to a particular location of a nucleic acid molecule (i.e., target nucleic acid molecule), which in some embodiments is a particular genomic locus, to alter the expression of a desired sequence. In some embodiments, the binding of a fusion protein to a target sequence results in deamination a nucleotide base, resulting in conversion from one nucleotide base to another. In some embodiments, the binding of this fusion protein to a target sequence results in deamination of a nucleotide base adjacent to the target sequence. The nucleotide base adjacent to the target sequence that is deaminated and mutated using the presently disclosed compositions and methods may be 1, 2, 3, 4, 5, 6, 7, 8, 9, 10, 11, 12, 13, 14, 15, 16, 17, 18, 19, 20, 25, 30, 35, 40, 45, 50, 55, 60, 65, 70, 75, 80, 85, 90, 95, or 100 base pairs from the 5′ or 3′ end of the target sequence (bound by the gRNA) within the target nucleic acid molecule. Some aspects of this disclosure provide fusion proteins comprising (i) a nuclease-inactive or nickase RGN polypeptide; (ii) a deaminase polypeptide; and (iii) a uracil stabilizing polypeptide.

[0062] The instant disclosure provides fusion proteins of various configurations. In some embodiments, the deaminase polypeptide is fused to the N-terminus of the RGN polypeptide. In some embodiments, the deaminase polypeptide is fused to the C-terminus of the RGN polypeptide.

[0063] In some embodiments, the USP domain, deaminase domain, and RNA-guided, DNA-binding polypeptide are fused to each other via a linker. Various linker lengths and flexibilities between the three functional domains of the fusion protein can be employed (e.g., ranging from very flexible linkers of the form (GGGGS)ₙ and (G)ₙ to more rigid linkers of the form (EAAAK)ₙ and (XP)ₙ in order to achieve the optimal length for deaminase activity for the specific applications. The term “linker,” as used herein, refers to a chemical group or a molecule linking two molecules or moieties, e.g., a binding domain and a cleavage domain of a nuclease. In some embodiments, a linker joins an RNA guided nuclease and a deaminase. In some embodiments, a linker joins a dCas9 and a deaminase. Typically, the linker is positioned between, or flanked by, two groups, molecules, or other moieties and connected to each one via a covalent bond, thus connecting the two. In some embodiments, the linker is an amino acid or a plurality of amino acids (e.g., a peptide or protein). In some embodiments, the linker is an organic molecule, group, polymer, or chemical moiety. In some embodiments, the linker is 5-100 amino acids in length, for example, 5, 6, 7, 8, 9, 10, 11, 12, 13, 14, 15, 16, 17, 18, 19, 20, 21, 22, 23, 24, 25, 26, 27, 28, 29, 30, 30-35, 35-40, 40-45, 45-50, 50-60, 60-70, 70-80, 80-90, 90-100, 100-150, or 150-200 amino acids in length. Longer or shorter linkers are also contemplated.

[0064] In some embodiments, the linker comprises a (GGGGS)ₙ, a (G)ₙ an (EAAAK)ₙ, or an (XP)ₙ motif, or a combination of any of these, wherein n is independently an integer between 1 and 30. In some embodiments, n is independently 1, 2, 3, 4, 5, 6, 7, 8, 9, 10, 11, 12, 13, 14, 15, 16, 17, 18, 19, 20, 21, 22, 23, 24, 25, 26, 27, 28, 29, or 30, or, if more than one linker or more than one linker motif is present, any combination thereof Additional suitable linker motifs and linker configurations will be apparent to those of skill in the art. In some embodiments, suitable linker motifs and configurations include those described in Chen et al., 2013 (Adv Drug Deliv Rev. 65(10):1357-69, the entire contents of which are incorporated herein by reference). Additional suitable linker sequences will be apparent to those of skill in the art.

[0065] In some embodiments, the general architecture of exemplary fusion proteins provided herein comprises the structure: [NH₂]-[deaminase]-[RGN polypeptide]-[USP]-[COOH]; [NH₂]-[USP]-[deaminase]-[RGN polypeptide]-[COOH]; [NH₂]-[USP]-[RGN polypeptide]-[deaminase]-[COOH]; [NH 2 ]-[RGN polypeptide]-[deaminase]-[USP]-[COON]; [NH 2 ]-[RGN polypeptide]-[USP polypeptide]-[deaminase polypeptide]-[COON]; or [NH₂]-[deaminase polypeptide]-[USP polypeptide]-[RGN polypeptide]-[COON], wherein NH₂ is the N-terminus of the fusion protein, and COOH is the C-terminus of the fusion protein.

[0066] Some aspects of this disclosure provide deaminase-RGN-USP fusion proteins, deaminase-nuclease inactive RGN-USP fusion proteins and deaminase-nickase RGN-USP fusion proteins, with increased C-*T nucleobase editing efficiency as compared to a similar fusion protein that does not comprise a USP domain.

[0067] In some embodiments, the fusion protein comprises the structure: [NH₂]-[deaminase]-[nuclease-inactive RGN]-[USP]-[COOH]; [NH₂]-[deaminase polypeptide]-[USP]-[nuclease-inactive RGN]-[COOH]; [NH₂]-[USP]-[deaminase]-[nuclease-inactive RGN]-[COOH]; [NH₂]-[USP]-[nuclease-inactive RGN]-[deaminase]-[COON]; [NH₂]-[nuclease-inactive RGN]-[deaminase]-[USP]-[COON]; or [NH₂]-[nuclease-inactive RGN][USP]-[deaminase]-[COOH]. It should be understood that “nuclease-inactive RGN” represents any RGN, including any CRISPR-Cas protein, which has been mutated to be nuclease-inactive. It should also be understood that “USP” represents one or more USP polypeptides.

[0068] In other embodiments, the fusion protein comprises the structure: [NH₂]-[deaminase]-[RGN nickase]-[USP]-[COON]; [NH₂]-[deaminase]-[USP]-[RGN nickase]-[COON]; [NH₂]-[USP]-[deaminase]-[RGN nickase]-[COON]; [NH₂]-[USP]-[RGN nickase]-[deaminase]-[COON]; [NH₂]-[RGN nickase]-[deaminase]-[USP]-[COOH]; or [NH₂]-[RGN nickase]-[USP]-[ deaminase]-[COON]. It should be understood that “RGN nickase” represents any RGN, including any CRISPR-Cas protein, which has been mutated to be active as a nickase. It should also be understood that “USP” represents one or more USP polypeptides.

[0069] In some embodiments, the fusion protein comprises a cytidine deaminase having at least 80% sequence identity to any one of SEQ ID NOs: 47, 48 and 76-94, an RGN (or nickase thereof) having at least 80% sequence identity to any one of SEQ ID NOs: 40, 41, 95-142, and a USP having at least 80% sequence identity to any one of SEQ ID NOs: 1-16.

[0070] In some embodiments, the fusion protein comprises a cytidine deaminase having at least 85% sequence identity to any one of SEQ ID NOs: 47, 48, and 76-94, an RGN (or nickase thereof) having at least 85% sequence identity to any one of SEQ ID NOs: 40, 41, and 95-142, and a USP having at least 85% sequence identity to any one of SEQ ID NOs: 1-16.

[0071] In some embodiments, the fusion protein comprises a cytidine deaminase having at least 90% sequence identity to any one of SEQ ID NOs: 47, 48, and 76-94, an RGN (or nickase thereof) having at least 90% sequence identity to any one of SEQ ID NOs: 40, 41, and 95-142, and a USP having at least 90% sequence identity to any one of SEQ ID NOs: 1-16.

[0072] In some embodiments, the fusion protein comprises a cytidine deaminase having at least 95% sequence identity to any one of SEQ ID NOs: 47, 48, and 76-94, an RGN (or nickase thereof) having at least 95% sequence identity to any one of SEQ ID NOs: 40, 41, and 95-142, and a USP having at least 95% sequence identity to any one of SEQ ID NOs: 1-16.

[0073] In some embodiments, the fusion protein comprises a cytidine deaminase having the amino acid sequence set forth in any one of SEQ ID NOs: 47, 48, and 76-94, an RGN (or nickase thereof) having the amino acid sequence set forth in any one of SEQ ID NOs: 40, 41 and 95-142, and a USP having the amino acid sequence set forth in any one of SEQ ID NOs: 1-16.

[0074] In some embodiments, the “−” used in the general architecture above indicates the presence of an optional linker sequence. In some embodiments, the fusion proteins provided herein do not comprise a linker sequence. In some embodiments, at least one of the optional linker sequences are present.

[0075] Other exemplary features that may be present are localization sequences, such as nuclear localization sequences, cytoplasmic localization sequences, export sequences, such as nuclear export sequences, or other localization sequences, as well as sequence tags that are useful for solubilization, purification or detection of the fusion proteins. Suitable localization signal sequences and sequences of protein tags that are provided herein, and include, but are not limited to, biotin carboxylase carrier protein (BCCP) tags, myc-tags, calmodulin-tags, FLAG-tags, hemagglutinin (HA)-tags, polyhistidine tags, also referred to as histidine tags or His-tags, maltose binding protein (MBP)-tags, nus-tags, glutathione-S-transferase (GST)-tags, green fluorescent protein (GFP)-tags, thioredoxin- tags, S-tags, Softags (e.g., Softag 1, Softag 3), streptags, biotin ligase tags, FlAsH tags, V5 tags, and SBP-tags. Additional suitable sequences will be apparent to those of skill in the art.

[0076] In certain embodiments, the presently disclosed fusion proteins comprise at least one cell-penetrating domain that facilitates cellular uptake of the fusion protein. Cell-penetrating domains are known in the art and generally comprise stretches of positively charged amino acid residues (i.e., polycationic cell-penetrating domains), alternating polar amino acid residues and non-polar amino acid residues (i.e., amphipathic cell-penetrating domains), or hydrophobic amino acid residues (i.e., hydrophobic cell-penetrating domains) (see, e.g., Milletti F. (2012) Drug Discov Today 17:850-860). A non-limiting example of a cell-penetrating domain is the trans-activating transcriptional activator (TAT) from the human immunodeficiency virus 1.

[0077] In some embodiments, USPs or fusion proteins provided herein further comprise a nuclear localization sequence (NLS). The nuclear localization signal, plastid localization signal, mitochondrial localization signal, dual-targeting localization signal, and/or cell-penetrating domain can be located at the amino-terminus (N-terminus), the carboxyl-terminus (C-terminus), or in an internal location of the fusion protein.

[0078] In some embodiments, the NLS is fused to the N-terminus of the fusion protein or USP. In some embodiments, the NLS is fused to the C-terminus of the fusion protein or USP. In some embodiments, the NLS is fused to the N-terminus of the USP of the fusion protein. In some embodiments, the NLS is fused to the C-terminus of the USP of the fusion protein. In some embodiments, the NLS is fused to the N-terminus of the RGN polypeptide of the fusion protein. In some embodiments, the NLS is fused to the C-terminus of the RGN polypeptide of the fusion protein. In some embodiments, the NLS is fused to the N-terminus of the deaminase polypeptide of the fusion protein. In some embodiments, the NLS is fused to the C-terminus of the deaminase polypeptide of the fusion protein.In some embodiments, the NLS is fused to the fusion protein or UPS via one or more linkers. In some embodiments, the NLS is fused to the fusion protein or UPS without a linker. In some embodiments, the NLS comprises an amino acid sequence of any one of the NLS sequences provided or referenced herein. In some embodiments, the NLS comprises an amino acid sequence as set forth in SEQ ID NO: 42 or SEQ ID NO: 45.

[0079] In some embodiments, fusion proteins as provided herein comprise the full-length sequence of a uracil stabilizing protein, e.g., any one of SEQ ID NO: 1-16. In other embodiments, however, fusion proteins as provided herein do not comprise a full-length sequence of a USP, but only a fragment thereof. For example, in some embodiments, a fusion protein provided herein further comprises an RNA-guided, DNA-binding domain, a deaminase domain, and an active fragment of a USP.

[0080] In some embodiments, a fusion protein of the invention comprises an RGN, a deaminase, and a USP, wherein the USP has an amino acid sequence of at least 50%, at least 55%, at least 60%, at least 65%, at least 70%, at least 75%, at least 80%, at least 85%, at least 90%, at least 95%, at least 96%, at least 97%, at least 98%, at least 99%, or 100% identical to any of SEQ ID NO: 1-16. Examples of such fusion proteins are described in the Examples section here.

[0081] In some embodiments, the fusion protein comprises one USP polypeptide. In some embodiments, the fusion protein comprises at least two USP polypeptides, operably linked either directly or via a linker. In some embodiments, the fusion protein comprises one USP polypeptide, and a second USP polypeptide is co-expressed with the fusion protein.

[0082] Another embodiment of the invention is a ribonucleoprotein complex comprising the fusion protein and the guide RNA, either as a single guide or as a dual guide RNA (collectively referred to as gRNA).

### IV. Nucleotides Encoding Uracil Stabilizing Polypeptides, Fusion Proteins, and/or gRNA

[0083] The present disclosure provides polynucleotides encoding the presently disclosed uracil stabilizing polypeptides (SEQ ID NOs: 17-32). The present disclosure further provides polynucleotides encoding for fusion proteins which comprise a deaminase and DNA-binding polypeptide, for example a meganuclease, a zinc finger fusion protein, or a TALEN. The present disclosure further provides polynucleotides encoding for fusion proteins which comprise a USP, a deaminase domain, and an RNA-guided, DNA-binding polypeptide. Such RNA-guided, DNA-binding polypeptide may be an RGN or RGN variant. The protein variant may be nuclease-inactive or a nickase. The RGN may be a CRISPR-Cas protein or active variant or fragment thereof. SEQ ID NOs: 40 and 41 are non-limiting examples of an RGN and a nickase RGN variant, respectively. Examples of CRISPR-Cas nucleases are well-known in the art, and similar corresponding mutations can create mutant variants which are also nickases or are nuclease inactive.

[0084] An embodiment of the invention provides a polynucleotide encoding a fusion protein which comprises an RGN, a deaminase, and a USP described herein (SEQ ID NO: 1-16, or a variant thereof). In some embodiments, a second polynucleotide encodes the guide RNA required by the RGN for targeting to the nucleotide sequence of interest. In other embodiments, the guide RNA and the fusion protein are encoded by the same polynucleotide.

[0085] The use of the term “polynucleotide” is not intended to limit the present disclosure to polynucleotides comprising DNA. Those of ordinary skill in the art will recognize that polynucleotides can comprise ribonucleotides (RNA) and combinations of ribonucleotides and deoxyribonucleotides. Such deoxyribonucleotides and ribonucleotides include both naturally occurring molecules and synthetic analogues. The polynucleotides disclosed herein also encompass all forms of sequences including, but not limited to, single-stranded forms, double-stranded forms, stem-and-loop structures, and the like.

[0086] An embodiment of the invention is a nucleic acid molecule comprising a sequence at least 50%, at least 55%, at least 60%, at least 65%, at least 70%, at least 75%, at least 80%, at least 85%, at least 90%, at least 95%, at least 96%, at least 97%, at least 98%, at least 99% or is 100% identical to any of SEQ ID NOs: 17-32, wherein the nucleic acid molecule encodes a USP having uracil stabilizing activity. The nucleic acid molecule may further comprise a heterologous promoter or terminator. The nucleic acid molecule may encode a fusion protein, where the encoded USP is operably linked to a DNA-binding polypeptide, and/or a deaminase. In some embodiments, the nucleic acid molecule encodes a fusion protein, where the encoded USP is operably linked to an RGN and/or a deaminase

[0087] Nucleic acid molecules comprising a polynucleotide which encodes a USP of the invention can be codon optimized for expression in an organism of interest. A “codon-optimized” coding sequence is a polynucleotide coding sequence having its frequency of codon usage designed to mimic the frequency of preferred codon usage or transcription conditions of a particular host cell. Expression in the particular host cell or organism is enhanced as a result of the alteration of one or more codons at the nucleic acid level such that the translated amino acid sequence is not changed. Nucleic acid molecules can be codon optimized, either wholly or in part. Codon tables and other references providing preference information for a wide range of organisms are available in the art (see, e.g., Campbell and Gowri (1990) Plant Physiol. 92:1-11 for a discussion of plant-preferred codon usage). Methods are available in the art for synthesizing plant-preferred genes. See, for example, U.S. Pat. Nos. 5,380,831, and 5,436,391, and Murray et al. (1989) Nucleic Acids Res. 17:477-498, herein incorporated by reference.

[0088] Polynucleotides encoding the USPs, fusion proteins, and/or gRNAs described herein can be provided in expression cassettes for in vitro expression or expression in a cell, organelle, embryo, or organism of interest. The cassette will include 5′ and 3′ regulatory sequences operably linked to a polynucleotide encoding a USP and/or a fusion protein comprising a USP, an RNA-guided DNA-binding polypeptide and a deaminase, and/or gRNA provided herein that allows for expression of the polynucleotide. The cassette may additionally contain at least one additional gene or genetic element to be cotransformed into the organism. Where additional genes or elements are included, the components are operably linked. The term “operably linked” is intended to mean a functional linkage between two or more elements. For example, an operable linkage between a promoter and a coding region of interest (e.g., region coding for a USP, deaminase, RNA-guided DNA-binding polypeptide, and/or gRNA) is a functional link that allows for expression of the coding region of interest. Operably linked elements may be contiguous or non-contiguous. When used to refer to the joining of two protein coding regions, by operably linked is intended that the coding regions are in the same reading frame. Alternatively, the additional gene(s) or element(s) can be provided on multiple expression cassettes. For example, the nucleotide sequence encoding a presently disclosed uracil stabilizing polypeptide, either alone or as a component of a fusion protein, can be present on one expression cassette, whereas the nucleotide sequence encoding a gRNA can be on a separate expression cassette. Another example may have the nucleotide sequence encoding a presently disclosed USP alone on a first expression cassette, a second expression cassette encoding a fusion protein comprising a USP, and a nucleotide sequence encoding a gRNA on third expression cassette. Such an expression cassette is provided with a plurality of restriction sites and/or recombination sites for insertion of the polynucleotides to be under the transcriptional regulation of the regulatory regions. Expression cassettes which comprise a selectable marker gene may also be present.

[0089] The expression cassette will include in the 5′-3′ direction of transcription, a transcriptional (and, in some embodiments, translational) initiation region (i.e., a promoter), a USP-encoding polynucleotide of the invention, and a transcriptional (and in some embodiments, translational) termination region (i.e., termination region) functional in the organism of interest. The promoters of the invention are capable of directing or driving expression of a coding sequence in a host cell. The regulatory regions (e.g., promoters, transcriptional regulatory regions, and translational termination regions) may be endogenous or heterologous to the host cell or to each other. As used herein, “heterologous” in reference to a sequence is a sequence that originates from a foreign species, or, if from the same species, is substantially modified from its native form in composition and/or genomic locus by deliberate human intervention. As used herein, a chimeric gene comprises a coding sequence operably linked to a transcription initiation region that is heterologous to the coding sequence.

[0090] Convenient termination regions are available from the Ti-plasmid of A. tumefaciens, such as the octopine synthase and nopaline synthase termination regions. See also Guerineau et al. (1991) Mol. Gen. Genet. 262:141-144; Proudfoot (1991) Cell 64:671-674; Sanfacon et al. (1991) Genes Dev. 5:141-149; Mogen et al. (1990) Plant Cell 2:1261-1272; Munroe et al. (1990) Gene 91:151-158; Ballas et al. (1989) Nucleic Acids Res. 17:7891-7903; and Joshi et al. (1987) Nucleic Acids Res. 15:9627-9639.

[0091] Additional regulatory signals include, but are not limited to, transcriptional initiation start sites, operators, activators, enhancers, other regulatory elements, ribosomal binding sites, an initiation codon, termination signals, and the like. See, for example, U.S. Pat. Nos. 5,039,523 and 4,853,331; EPO 0480762A2; Sambrook et al. (1992) Molecular Cloning: A Laboratory Manual, ed. Maniatis et al. (Cold Spring Harbor Laboratory Press, Cold Spring Harbor, N.Y.), hereinafter “Sambrook 11”; Davis et al., eds. (1980) Advanced Bacterial Genetics (Cold Spring Harbor Laboratory Press), Cold Spring Harbor, N.Y., and the references cited therein.

[0092] In preparing the expression cassette, the various DNA fragments may be manipulated, so as to provide for the DNA sequences in the proper orientation and, as appropriate, in the proper reading frame. Toward this end, adapters or linkers may be employed to join the DNA fragments or other manipulations may be involved to provide for convenient restriction sites, removal of superfluous DNA, removal of restriction sites, or the like. For this purpose, in vitro mutagenesis, primer repair, restriction, annealing, resubstitutions, e.g., transitions and transversions, may be involved.

[0093] A number of promoters can be used in the practice of the invention. The promoters can be selected based on the desired outcome. The nucleic acids can be combined with constitutive, inducible, growth stage-specific, cell type-specific, tissue-preferred, tissue-specific, or other promoters for expression in the organism of interest. See, for example, promoters set forth in WO 99/43838 and in U.S. Pat. Nos. 8,575,425; 7,790,846; 8,147,856; 8,586832; 7,772,369; 7,534,939; 6,072,050; 5,659,026; 5,608,149; 5,608,144; 5,604,121; 5,569,597; 5,466,785; 5,399,680; 5,268,463; 5,608,142; and 6,177,611; herein incorporated by reference.

[0094] For expression in plants, constitutive promoters also include CaMV 35S promoter (Odell et al. (1985) Nature 313:810-812); rice actin (McElroy et al. (1990) Plant Cell 2:163-171); ubiquitin (Christensen et al. (1989) Plant Mol. Biol. 12:619-632 and Christensen et al. (1992) Plant Mol. Biol. 18:675-689); pEMU (Last et al. (1991) Theor. Appl. Genet. 81:581-588); and MAS (Velten et al. (1984) EMBO J. 3:2723-2730).

[0095] Examples of inducible promoters are the Adhl promoter which is inducible by hypoxia or cold stress, the Hsp70 promoter which is inducible by heat stress, the PPDK promoter and the pepcarboxylase promoter which are both inducible by light. Also useful are promoters which are chemically inducible, such as the In2-2 promoter which is safener induced (U.S. Pat. No. 5,364,780), the Axigl promoter which is auxin induced and tapetum specific but also active in callus (PCT US01/22169), the steroid-responsive promoters (see, for example, the ERE promoter which is estrogen induced, and the glucocorticoid-inducible promoter in Schena et al. (1991) Proc. Natl. Acad. Sci. USA 88:10421-10425 and McNellis et al. (1998) Plant J. 14(2):247-257) and tetracycline-inducible and tetracycline-repressible promoters (see, for example, Gatz et al. (1991) Mol. Gen. Genet. 227:229-237, and U.S. Pat. Nos. 5,814,618 and 5,789,156), herein incorporated by reference.

[0096] Tissue-specific or tissue-preferred promoters can be utilized to target expression of an expression construct within a particular tissue. In certain embodiments, the tissue-specific or tissue-preferred promoters are active in plant tissue. Examples of promoters under developmental control in plants include promoters that initiate transcription preferentially in certain tissues, such as leaves, roots, fruit, seeds, or flowers. A “tissue specific” promoter is a promoter that initiates transcription only in certain tissues. Unlike constitutive expression of genes, tissue-specific expression is the result of several interacting levels of gene regulation. As such, promoters from homologous or closely related plant species can be preferable to use to achieve efficient and reliable expression of transgenes in particular tissues. In some embodiments, the expression comprises a tissue-preferred promoter. A “tissue preferred” promoter is a promoter that initiates transcription preferentially, but not necessarily entirely or solely in certain tissues.

[0097] In some embodiments, the nucleic acid molecules encoding a USP described herein comprise a cell type-specific promoter. A “cell type specific” promoter is a promoter that primarily drives expression in certain cell types in one or more organs. Some examples of plant cells in which cell type specific promoters functional in plants may be primarily active include, for example, BETL cells, vascular cells in roots, leaves, stalk cells, and stem cells. The nucleic acid molecules can also include cell type preferred promoters. A “cell type preferred” promoter is a promoter that primarily drives expression mostly, but not necessarily entirely or solely in certain cell types in one or more organs. Some examples of plant cells in which cell type preferred promoters functional in plants may be preferentially active include, for example, BETL cells, vascular cells in roots, leaves, stalk cells, and stem cells.

[0098] The nucleic acid sequences encoding the USPs, fusion proteins, and/or gRNAs can be operably linked to a promoter sequence that is recognized by a phage RNA polymerase for example, for in vitro mRNA synthesis. In such embodiments, the in vitro-transcribed RNA can be purified for use in the methods described herein. For example, the promoter sequence can be a T7, T3, or SP6 promoter sequence or a variation of a T7, T3, or SP6 promoter sequence. In such embodiments, the expressed protein and/or RNAs can be purified for use in the methods of genome modification described herein.

[0099] In certain embodiments, the polynucleotide encoding the USP, fusion protein, and/or gRNA also can be linked to a polyadenylation signal (e.g., SV40 polyA signal and other signals functional in plants) and/or at least one transcriptional termination sequence. Additionally, the sequence encoding the deaminase or fusion protein also can be linked to sequence(s) encoding at least one nuclear localization signal, at least one cell-penetrating domain, and/or at least one signal peptide capable of trafficking proteins to particular subcellular locations, as described elsewhere herein.

[0100] The polynucleotide encoding the USP, fusion protein, and/or gRNA can be present in a vector or multiple vectors. A “vector” refers to a polynucleotide composition for transferring, delivering, or introducing a nucleic acid into a host cell. Suitable vectors include plasmid vectors, phagemids, cosmids, artificial/mini-chromosomes, transposons, and viral vectors (e.g., lentiviral vectors, adeno-associated viral vectors, baculoviral vector). The vector can comprise additional expression control sequences (e g., enhancer sequences, Kozak sequences, polyadenylation sequences, transcriptional termination sequences), selectable marker sequences (e.g., antibiotic resistance genes), origins of replication, and the like. Additional information can be found in “Current Protocols in Molecular Biology” Ausubel et al., John Wiley & Sons, New York, 2003 or “Molecular Cloning: A Laboratory Manual” Sambrook & Russell, Cold Spring Harbor Press, Cold Spring Harbor, N.Y., 3rd edition, 2001.

[0101] The vector can also comprise a selectable marker gene for the selection of transformed cells. Selectable marker genes are utilized for the selection of transformed cells or tissues. Marker genes include genes encoding antibiotic resistance, such as those encoding neomycin phosphotransferase II (NEO) and hygromycin phosphotransferase (HPT), as well as genes conferring resistance to herbicidal compounds, such as glufosinate ammonium, bromoxynil, imidazolinones, and 2,4-dichlorophenoxyacetate (2,4-D).

[0102] In some embodiments, the expression cassette or vector comprising the sequence encoding a fusion protein comprising an RNA-guided DNA-binding polypeptide, such as an RGN, can further comprise a sequence encoding a gRNA. The sequence(s) encoding the gRNA can be operably linked to at least one transcriptional control sequence for expression of the gRNA in the organism or host cell of interest. For example, the polynucleotide encoding the gRNA can be operably linked to a promoter sequence that is recognized by RNA polymerase III (Pol III). Examples of suitable Pol III promoters include, but are not limited to, mammalian U6, U3, H1, and 7SL RNA promoters and rice U6 and U3 promoters.

[0103] As indicated, expression constructs comprising nucleotide sequences encoding the USPs, fusion proteins, and/or gRNAs can be used to transform organisms of interest. Methods for transformation involve introducing a nucleotide construct into an organism of interest. By “introducing” is intended to introduce the nucleotide construct to the host cell in such a manner that the construct gains access to the interior of the host cell. The methods of the invention do not require a particular method for introducing a nucleotide construct to a host organism, only that the nucleotide construct gains access to the interior of at least one cell of the host organism. The host cell can be a eukaryotic or prokaryotic cell. In particular embodiments, the eukaryotic host cell is a plant cell, a mammalian cell, or an insect cell. Methods for introducing nucleotide constructs into plants and other host cells are known in the art including, but not limited to, stable transformation methods, transient transformation methods, and virus-mediated methods.

[0104] The methods result in a transformed organism, such as a plant, including whole plants, as well as plant organs (e.g., leaves, stems, roots, etc.), seeds, plant cells, propagules, embryos and progeny of the same. Plant cells can be differentiated or undifferentiated (e.g. callus, suspension culture cells, protoplasts, leaf cells, root cells, phloem cells, pollen).

[0105] “Transgenic organisms” or “transformed organisms” or “stably transformed” organisms or cells or tissues refers to organisms that have incorporated or integrated a polynucleotide encoding a deaminase of the invention. It is recognized that other exogenous or endogenous nucleic acid sequences or DNA fragments may also be incorporated into the host cell. Agrobacterium-and biolistic-mediated transformation remain the two predominantly employed approaches for transformation of plant cells. However, transformation of a host cell may be performed by infection, transfection, microinjection, electroporation, microprojection, biolistics or particle bombardment, electroporation, silica/carbon fibers, ultrasound mediated, PEG mediated, calcium phosphate co-precipitation, polycation DMSO technique, DEAE dextran procedure, and viral mediated, liposome mediated and the like. Viral-mediated introduction of a polynucleotide encoding a deaminase, fusion protein, and/or gRNA includes retroviral, lentiviral, adenoviral, and adeno-associated viral mediated introduction and expression, as well as the use of Caulimoviruses (e.g., cauliflower mosaic virus), Geminiviruses (e.g., bean golden yellow mosaic virus or maize streak virus), and RNA plant viruses (e.g., tobacco mosaic virus).

[0106] Transformation protocols as well as protocols for introducing polypeptides or polynucleotide sequences into plants may vary depending on the type of host cell (e.g., monocot or dicot plant cell) targeted for transformation. Methods for transformation are known in the art and include those set forth in U.S. Pat. Nos. 8,575,425; 7,692,068; 8,802,934; 7,541,517; each of which is herein incorporated by reference. See, also, Rakoczy-Trojanowska, M. (2002) Cell Mol Biol Lett. 7:849-858; Jones et al. (2005) Plant Methods 1:5; Rivera et al. (2012) Physics of Life Reviews 9:308-345; Bartlett et al. (2008) Plant Methods 4:1-12; Bates, G.W. (1999) Methods in Molecular Biology 111:359-366; Binns and Thomashow (1988) Annual Reviews in Microbiology 42:575-606; Christou, P. (1992) The Plant Journal 2:275-281; Christou, P. (1995) Euphytica 85:13-27; Tzfira et al. (2004) TRENDS in Genetics 20:375-383; Yao et al. (2006) Journal of Experimental Botany 57:3737-3746; Zupan and Zambryski (1995) Plant Physiology 107:1041-1047; Jones et al. (2005) Plant Methods 1:5;

[0107] Transformation may result in stable or transient incorporation of the nucleic acid into the cell. “Stable transformation” is intended to mean that the nucleotide construct introduced into a host cell integrates into the genome of the host cell and is capable of being inherited by the progeny thereof. “Transient transformation” is intended to mean that a polynucleotide is introduced into the host cell and does not integrate into the genome of the host cell.

[0108] Methods for transformation of chloroplasts are known in the art. See, for example, Svab et al. (1990) Proc. Natl. Acad. Sci. USA 87:8526-8530; Svab and Maliga (1993) Proc. Natl. Acad. Sci. USA 90:913-917; Svab and Maliga (1993) EMBO J. 12:601-606. The method relies on particle gun delivery of DNA containing a selectable marker and targeting of the DNA to the plastid genome through homologous recombination. Additionally, plastid transformation can be accomplished by transactivation of a silent plastid-borne transgene by tissue-preferred expression of a nuclear-encoded and plastid-directed RNA polymerase. Such a system has been reported in McBride et al. (1994) Proc. Natl. Acad. Sci. USA 91:7301-7305.

[0109] The cells that have been transformed may be grown into a transgenic organism, such as a plant, in accordance with conventional ways. See, for example, McCormick et al. (1986) Plant Cell Reports 5:81-84. These plants may then be grown, and either pollinated with the same transformed strain or different strains, and the resulting hybrid having constitutive expression of the desired phenotypic characteristic identified. Two or more generations may be grown to ensure that expression of the desired phenotypic characteristic is stably maintained and inherited and then seeds harvested to ensure expression of the desired phenotypic characteristic has been achieved. In this manner, the present invention provides transformed seed (also referred to as “transgenic seed”) having a nucleotide construct of the invention, for example, an expression cassette of the invention, stably incorporated into their genome.

[0110] Alternatively, cells that have been transformed may be introduced into an organism. These cells could have originated from the organism, wherein the cells are transformed in an ex vivo approach.

[0111] The sequences provided herein may be used for transformation of any plant species, including, but not limited to, monocots and dicots. Examples of plants of interest include, but are not limited to, corn (maize), sorghum, wheat, sunflower, tomato, crucifers, peppers, potato, cotton, rice, soybean, sugarbeet, sugarcane, tobacco, barley, and oilseed rape, Brassica sp., alfalfa, rye, millet, safflower, peanuts, sweet potato, cassaya, coffee, coconut, pineapple, citrus trees, cocoa, tea, banana, avocado, fig, guava, mango, olive, papaya, cashew, macadamia, almond, oats, vegetables, ornamentals, and conifers.

[0112] Vegetables include, but are not limited to, tomatoes, lettuce, green beans, lima beans, peas, and members of the genus Curcumis such as cucumber, cantaloupe, and musk melon. Ornamentals include, but are not limited to, azalea, hydrangea, hibiscus, roses, tulips, daffodils, petunias, carnation, poinsettia, and chrysanthemum. Preferably, plants of the present invention are crop plants (for example, maize, sorghum, wheat, sunflower, tomato, crucifers, peppers, potato, cotton, rice, soybean, sugarbeet, sugarcane, tobacco, barley, oilseed rape, etc.).

[0113] As used herein, the term plant includes plant cells, plant protoplasts, plant cell tissue cultures from which plants can be regenerated, plant calli, plant clumps, and plant cells that are intact in plants or parts of plants such as embryos, pollen, ovules, seeds, leaves, flowers, branches, fruit, kernels, ears, cobs, husks, stalks, roots, root tips, anthers, and the like. Grain is intended to mean the mature seed produced by commercial growers for purposes other than growing or reproducing the species. Progeny, variants, and mutants of the regenerated plants are also included within the scope of the invention, provided that these parts comprise the introduced polynucleotides. Further provided is a processed plant product or byproduct that retains the sequences disclosed herein, including for example, soymeal.

[0114] The polynucleotides encoding the USPs, fusion proteins, and/or gRNAs can be used to transform any eukaryotic species, including but not limited to animals (e.g., mammals, insects, fish, birds, and reptiles), fungi, amoeba, algae, and yeast. The polynucleotides encoding the USPs, fusion proteins, and/or gRNAs can also be used to transform any prokaryotic species, including but not limited to, archaea and bacteria (e.g., Bacillus spp., Klebsiella spp. Streptomyces spp., Rhizobium spp., Escherichia spp., Pseudomonas spp., Salmonella spp., Shigella spp., Vibrio spp., Yersinia spp., Mycoplasma spp., Agrobacterium spp., and Lactobacillus spp.).

[0115] Conventional viral and non-viral based gene transfer methods can be used to introduce nucleic acids in mammalian cells or target tissues. Such methods can be used to administer nucleic acids encoding a fusion protein of the invention and optionally a gRNA to cells in culture, or in a host organism. Non-viral vector delivery systems include DNA plasmids, RNA (e.g. a transcript of a vector described herein), naked nucleic acid, and nucleic acid complexed with a delivery vehicle, such as a liposome. Viral vector delivery systems include DNA and RNA viruses, which have either episomal or integrated genomes after delivery to the cell. Non-limiting examples include vectors utilizing Caulimoviruses (e.g., cauliflower mosaic virus), Geminiviruses (e.g., bean golden yellow mosaic virus or maize steak virus), and RNA plant viruses (e.g., tobacco mosaic virus). For a review of gene therapy procedures, see Anderson, Science 256: 808- 813 (1992); Nabel & Feigner, TIBTECH 11:211-217 (1993); Mitani & Caskey, TIBTECH 11:162-166 (1993); Dillon, TIBTECH 11:167-175 (1993); Miller, Nature 357:455-460 (1992); Van Brunt, Biotechnology 6(10): 1149-1154 (1988); Vigne, Restorative Neurology and Neuroscience 8:35-36 (1995); Kremer & Perricaudet, British Medical Bulletin 51(1):31-44 (1995); Haddada et al., in Current Topics in Microbiology and Immunology, Doerfler and Bohm (eds) (1995); and Yu et al., Gene Therapy 1:13-26 (1994).

[0116] Methods of non-viral delivery of nucleic acids include lipofection, Agrobacterium-mediated transformation, nucleofection, microinjection, biolistics, virosomes, liposomes, immunoliposomes, polycation or lipid: nucleic acid conjugates, naked DNA, artificial virions, and agent-enhanced uptake of DNA. Lipofection is described in e.g., U.S. Pat. Nos. 5,049,386, 4,946,787; and 4,897,355) and lipofection reagents are sold commercially (e.g., Transfectam™ and Lipofectin™). Cationic and neutral lipids that are suitable for efficient receptor-recognition lipofection of polynucleotides include those of Feigner, WO 91/17424; WO 91/16024. Delivery can be to cells (e.g. in vitro or ex vivo administration) or target tissues (e.g. in vivo administration). The preparation of lipid:nucleic acid complexes, including targeted liposomes such as immunolipid complexes, is well known to one of skill in the art (see, e.g., Crystal, Science 270:404-410 (1995); Blaese et al., Cancer Gene Ther. 2:291- 297 (1995); Behr et al., Bioconjugate Chem. 5:382-389 (1994); Remy et al., Bioconjugate Chem. 5:647-654 (1994); Gao et al., Gene Therapy 2:710-722 (1995); Ahmad et al., Cancer Res. 52:4817-4820 (1992); U.S. Pat. Nos. 4,186,183, 4,217,344, 4,235,871, 4,261,975, 4,485,054, 4,501,728, 4,774,085, 4,837,028, and 4,946,787).

[0117] The use of RNA or DNA viral based systems for the delivery of nucleic acids takes advantage of highly evolved processes for targeting a virus to specific cells in the body and trafficking the viral payload to the nucleus. Viral vectors can be administered directly to patients (in vivo) or they can be used to treat cells in vitro, and the modified cells may optionally be administered to patients (ex vivo). Conventional viral based systems could include retroviral, lentivirus, adenoviral, adeno-associated and herpes simplex virus vectors for gene transfer. Integration in the host genome is possible with the retrovirus, lentivirus, and adeno-associated virus gene transfer methods, often resulting in long term expression of the inserted transgene. Additionally, high transduction efficiencies have been observed in many different cell types and target tissues.

[0118] The tropism of a retrovirus can be altered by incorporating foreign envelope proteins, expanding the potential target population of target cells. Lentiviral vectors are retroviral vectors that are able to transduce or infect non-dividing cells and typically produce high viral titers. Selection of a retroviral gene transfer system would therefore depend on the target tissue. Retroviral vectors are comprised of cis-acting long terminal repeats with packaging capacity for up to 6-10 kb of foreign sequence. The minimum cis-acting LTRs are sufficient for replication and packaging of the vectors, which are then used to integrate the therapeutic gene into the target cell to provide permanent transgene expression. Widely used retroviral vectors include those based upon murine leukemia virus (MuLV), gibbon ape leukemia virus (GaLV), Simian Immuno deficiency virus (SIV), human immuno deficiency virus (HIV), and combinations thereof (see, e.g., Buchscher et al., J. Virol. 66:2731-2739 (1992); Johann et al., J. Virol. 66:1635-1640 (1992); Sommnerfelt et al., Virol. 176:58-59 (1990); Wilson et al., J. Virol. 63:2374-2378 (1989); Miller et al., J. Virol. 65:2220-2224 (1991); PCT/US94/05700).

[0119] In applications where transient expression is preferred, adenoviral based systems may be used. Adenoviral based vectors are capable of very high transduction efficiency in many cell types and do not require cell division. With such vectors, high titer and levels of expression have been obtained. This vector can be produced in large quantities in a relatively simple system. Adeno-associated virus (“AAV”) vectors may also be used to transduce cells with target nucleic acids, e.g., in the in vitro production of nucleic acids and peptides, and for in vivo and ex vivo gene therapy procedures (see, e.g., West et al., Virology 160:38-47 (1987); U.S. Pat. No. 4,797,368; WO 93/24641; Katin, Human Gene Therapy 5:793-801 (1994); Muzyczka, J. Clin. Invest. 94:1351 (1994). Construction of recombinant AAV vectors are described in a number of publications, including U.S. Pat. No. 5,173,414; Tratschin et al., Mol. Cell. Biol. 5:3251-3260 (1985); Tratschin, et al., Mol. Cell. Biol. 4:2072-2081 (1984); Hermonat & Muzyczka, PNAS 81:6466-6470 (1984); and Samulski et al., J. Virol. 63:03822-3828 (1989). Packaging cells are typically used to form virus particles that are capable of infecting a host cell. Such cells include 293 cells, which package adenovirus, and ψJ2 cells or PA317 cells, which package retrovirus.

[0120] Viral vectors used in gene therapy are usually generated by producing a cell line that packages a nucleic acid vector into a viral particle. The vectors typically contain the minimal viral sequences required for packaging and subsequent integration into a host, other viral sequences being replaced by an expression cassette for the polynucleotide(s) to be expressed. The missing viral functions are typically supplied in trans by the packaging cell line. For example, AAV vectors used in gene therapy typically only possess ITR sequences from the AAV genome which are required for packaging and integration into the host genome. Viral DNA is packaged in a cell line, which contains a helper plasmid encoding the other AAV genes, namely rep and cap, but lacking ITR sequences.

[0121] The cell line may also be infected with adenovirus as a helper. The helper virus promotes replication of the AAV vector and expression of AAV genes from the helper plasmid. The helper plasmid is not packaged in significant amounts due to a lack of ITR sequences. Contamination with adenovirus can be reduced by, e.g., heat treatment to which adenovirus is more sensitive than AAV. Additional methods for the delivery of nucleic acids to cells are known to those skilled in the art. See, for example, US20030087817, incorporated herein by reference.

[0122] In some embodiments, a host cell is transiently or non-transiently transfected with one or more vectors described herein. In some embodiments, a cell is transfected as it naturally occurs in a subject. In some embodiments, a cell that is transfected is taken from a subject. In some embodiments, the cell is derived from cells taken from a subject, such as a cell line. In some embodiments, the cell or cell line is prokaryotic. In other embodiments, the cell or cell line is eukaryotic. In further embodiments, the cell or cell line is derived from insect, avian, plant, or fungal species. In some embodiments, the cell or cell line may be mammalian, such as for example human, monkey, mouse, cow, swine, goat, hamster, rat, cat, or dog.

[0123] A wide variety of cell lines for tissue culture are known in the art. Examples of cell lines include, but are not limited to, C8161, CCRF-CEM, MOLT, mIMCD-3, NHDF, HeLaS3, Huhl, Huh4, Huh7, HUVEC, HASMC, HEKn, HEKa, MiaPaCell, Panel, PC-3, TF1, CTLL-2, CIR, Rath, CVI, RPTE, A10, T24, 182, A375, ARH-77, Calul, SW480, SW620, SKOV3, SK-UT, CaCo2, P388D1, SEM-K2, WEHI- 231, HB56, TIB55, lurkat, 145.01, LRMB, Bcl-1, BC-3, IC21, DLD2, Raw264.7, NRK, NRK-52E, MRCS, MEF, Hep G2, HeLa B, HeLa T4. COS, COS-1, COS-6, COS-M6A, BS-C-1 monkey kidney epithelial, BALB/3T3 mouse embryo fibroblast, 3T3 Swiss, 3T3-L1, 132-d5 human fetal fibroblasts; 10.1 mouse fibroblasts, 293-T, 3T3, 721, 9L, A2780, A2780ADR, A2780cis, A172, A20, A253, A431, A-549, ALC, B16, B35, BCP-I cells, BEAS-2B, bEnd.3, BHK-21, BR 293, BxPC3, C3H-10T1/2, C6/36, Cal-27, CHO, CHO-7, CHO-IR, CHO-K1, CHO-K2, CHO-T, CHO Dhfr-/-, COR-L23, COR-L23/CPR, COR-L235010, CORL23/ R23, COS-7, COV-434, CML Tl, CMT, CT26, D17, DH82, DU145, DuCaP, EL4, EM2, EM3, EMT6/AR1, EMT6/AR10.0, FM3, H1299, H69, HB54, HB55, HCA2, HEK-293, HeLa, Hepalcic7, HL-60, HMEC, HT-29, lurkat, lY cells, K562 cells, Ku812, KCL22, KG1, KYO1, LNCap, Ma-Mel 1-48, MC-38, MCF-7, MCF-10A, MDA-MB-231, MDA-MB-468, MDA-MB-435, MDCKII, MDCKII, MOR/0.2R, MONO-MAC 6, MTD-1A, MyEnd, NCI-H69/CPR, NCI-H69/LX10, NCI-H69/LX20, NCI-H69/LX4, NIH-3T3, NALM-1,

[0124] NW-145, OPCN/OPCT cell lines, Peer, PNT-1A/ PNT 2, RenCa, RIN-5F, RMA/RMAS, Saos-2 cells, Sf-9, SkBr3, T2, T-47D, T84, THP1 cell line, U373, U87, U937, VCaP, Vero cells, WM39, WT-49, X63, YAC-1, YAR, and transgenic varieties thereof Cell lines are available from a variety of sources known to those with skill in the art (see, e.g., the American Type Culture Collection (ATCC) (Manassas, Va.)).

[0125] In some embodiments, a cell transfected with one or more vectors described herein is used to establish a new cell line comprising one or more vector-derived sequences. In some embodiments, a cell transiently transfected with a fusion protein of the invention and optionally a gRNA, or with a ribonucleoprotein complex of the invention, and modified through the activity of fusion protein or ribonucleoprotein complex, is used to establish a new cell line comprising cells containing the modification but lacking any other exogenous sequence. In some embodiments, cells transiently or non-transiently transfected with one or more vectors described herein, or cell lines derived from such cells are used in assessing one or more test compounds.

[0126] In some embodiments, one or more vectors described herein are used to produce a non-human transgenic animal or transgenic plant. In some embodiments, the transgenic animal is an insect. In further embodiments, the insect is an insect pest, such as a mosquito or tick. In other embodiments, the insect is a plant pest, such as a corn rootworm or a fall armyworm. In some embodiments, the transgenic animal is a bird, such as a chicken, turkey, goose, or duck. In some embodiments, the transgenic animal is a mammal, such as a human, mouse, rat, hamster, monkey, ape, rabbit, swine, cow, horse, goat, sheep, cat, or dog.

### V. Variants and Fragments of Polypeptides and Polynucleotides

[0127] The present disclosure provides active variants and fragments of naturally-occurring (i.e., wild-type) uracil stabilizing polypeptides, the amino acid sequence of which are set forth as SEQ ID NO: 1-16, and polynucleotides encoding the same.

[0128] While the activity of a variant or fragment may be altered compared to the polynucleotide or polypeptide of interest, the variant and fragment should retain the functionality of the polynucleotide or polypeptide of interest. For example, a variant or fragment may have increased activity, decreased activity, different spectrum of activity or any other alteration in activity when compared to the polynucleotide or polypeptide of interest.

[0129] Fragments and variants of naturally-occurring USPs, such as those disclosed herein, will retain activity such that if they are part of a fusion protein further comprising a deaminase or a fragment thereof and/or a DNA-binding polypeptide or a fragment thereof, said fusion protein will exhibit increased C→T nucleobase editing efficiency as compared to a similar fusion protein that does not comprise a USP domain.

[0130] The term “fragment” refers to a portion of a polynucleotide or polypeptide sequence of the invention. “Fragments” or “biologically active portions” include polynucleotides comprising a sufficient number of contiguous nucleotides to retain the biological activity (i.e., deaminase activity on nucleic acids). “Fragments” or “biologically active portions” include polypeptides comprising a sufficient number of contiguous amino acid residues to retain the biological activity. Fragments of the USPs include those that are shorter than the full-length sequences due to the use of an alternate downstream start site. A biologically active portion of a USP can be a polypeptide that comprises, for example, 10, 20, 30, 40, 50, 60, 70, 80, 90, 100, 110, or more contiguous amino acid residues of any of SEQ ID NOs: 1-16, ora variant thereof Such biologically active portions can be prepared by recombinant techniques and evaluated for activity.

[0131] In general, “variants” is intended to mean substantially similar sequences. For polynucleotides, a variant comprises a deletion and/or addition of one or more nucleotides at one or more internal sites within the native polynucleotide and/or a substitution of one or more nucleotides at one or more sites in the native polynucleotide. As used herein, a “native” or “wild type” polynucleotide or polypeptide comprises a naturally occurring nucleotide sequence or amino acid sequence, respectively. For polynucleotides, conservative variants include those sequences that, because of the degeneracy of the genetic code, encode the native amino acid sequence of the gene of interest. Naturally occurring allelic variants such as these can be identified with the use of well-known molecular biology techniques, as, for example, with polymerase chain reaction (PCR) and hybridization techniques as outlined below. Variant polynucleotides also include synthetically derived polynucleotides, such as those generated, for example, by using site-directed mutagenesis but which still encode the polypeptide or the polynucleotide of interest. Generally, variants of a particular polynucleotide disclosed herein will have at least about 40%, 45%, 50%, 55%, 60%, 65%, 70%, 75%, 80%, 85%, 90%, 91%, 92%, 93%, 94%, 95%, 96%, 97%, 98%, 99% or more sequence identity to that particular polynucleotide as determined by sequence alignment programs and parameters described elsewhere herein.

[0132] Variants of a particular polynucleotide disclosed herein (i.e., the reference polynucleotide) can also be evaluated by comparison of the percent sequence identity between the polypeptide encoded by a variant polynucleotide and the polypeptide encoded by the reference polynucleotide. Percent sequence identity between any two polypeptides can be calculated using sequence alignment programs and parameters described elsewhere herein. Where any given pair of polynucleotides disclosed herein is evaluated by comparison of the percent sequence identity shared by the two polypeptides they encode, the percent sequence identity between the two encoded polypeptides is at least about 40%, 45%, 50%, 55%, 60%, 65%, 70%, 75%, 80%, 85%, 90%, 91%, 92%, 93%, 94%, 95%, 96%, 97%, 98%, 99% or more sequence identity.

[0133] In particular embodiments, the presently disclosed polynucleotides encode a USP comprising an amino acid sequence having at least 40%, 45%, 50%, 55%, 60%, 65%, 70%, 75%, 80%, 81%, 82%, 83%, 84%, 85%, 86%, 87%, 88%, 89%, 90%, 91%, 92%, 93%, 94%, 95%, 96%, 97%, 98%, 99%, or greater identity to an amino acid sequence of any of SEQ ID NOs: 1-16.

[0134] A biologically active variant of a uracil stabilizing polypeptide of the invention may differ by as few as about 1-15 amino acid residues, as few as about 1-10, such as about 6-10, as few as 5, as few as 4, as few as 3, as few as 2, or as few as 1 amino acid residue. In specific embodiments, the polypeptides can comprise an N-terminal or a C-terminal truncation, which can comprise at least a deletion of 5, 10, 15, 20, 25, 30, 35, 40, 45, 50, 55, 60, amino acids or more from either the N or C terminus of the polypeptide.

[0135] It is recognized that modifications may be made to the USPs provided herein creating variant proteins and polynucleotides. Changes designed by man may be introduced through the application of site-directed mutagenesis techniques. Alternatively, native, as yet-unknown or as yet unidentified polynucleotides and/or polypeptides structurally and/or functionally-related to the sequences disclosed herein may also be identified that fall within the scope of the present invention. Conservative amino acid substitutions may be made in nonconserved regions that do not alter the function of the uracil stabilizing polypeptide. Alternatively, modifications may be made that improve the activity of the uracil stabilizing polypeptide.

[0136] Variant polynucleotides and proteins also encompass sequences and proteins derived from a mutagenic and recombinogenic procedure such as DNA shuffling. With such a procedure, one or more different USPs disclosed herein (e.g., SEQ ID NO: 1-16) is manipulated to create a new USP possessing the desired properties. In this manner, libraries of recombinant polynucleotides are generated from a population of related sequence polynucleotides comprising sequence regions that have substantial sequence identity and can be homologously recombined in vitro or in vivo. For example, using this approach, sequence motifs encoding a domain of interest may be shuffled between the USP sequences provided herein and other subsequently identified USP genes to obtain a new gene coding for a protein with an improved property of interest, such as an increased Kₘ in the case of an enzyme. Strategies for such DNA shuffling are known in the art. See, for example, Stemmer (1994) Proc. Natl. Acad. Sci. USA 91:10747-10751; Stemmer (1994) Nature 370:389-391; Crameri et al. (1997) Nature Biotech. 15:436-438; Moore et al. (1997) J. Mol. Biol. 272:336-347; Zhang et al. (1997) Proc. Natl. Acad. Sci. USA 94:4504-4509; Crameri et al. (1998) Nature 391:288-291; and U.S. Pat. Nos. 5,605,793 and 5,837,458. A “shuffled” nucleic acid is a nucleic acid produced by a shuffling procedure such as any shuffling procedure set forth herein. Shuffled nucleic acids are produced by recombining (physically or virtually) two or more nucleic acids (or character strings), for example in an artificial, and optionally recursive, fashion. Generally, one or more screening steps are used in shuffling processes to identify nucleic acids of interest; this screening step can be performed before or after any recombination step. In some (but not all) shuffling embodiments, it is desirable to perform multiple rounds of recombination prior to selection to increase the diversity of the pool to be screened. The overall process of recombination and selection are optionally repeated recursively. Depending on context, shuffling can refer to an overall process of recombination and selection, or, alternately, can simply refer to the recombinational portions of the overall process.

[0137] As used herein, “sequence identity” or “identity” in the context of two polynucleotides or polypeptide sequences makes reference to the residues in the two sequences that are the same when aligned for maximum correspondence over a specified comparison window. When percentage of sequence identity is used in reference to proteins it is recognized that residue positions which are not identical often differ by conservative amino acid substitutions, where amino acid residues are substituted for other amino acid residues with similar chemical properties (e.g., charge or hydrophobicity) and therefore do not change the functional properties of the molecule. When sequences differ in conservative substitutions, the percent sequence identity may be adjusted upwards to correct for the conservative nature of the substitution. Sequences that differ by such conservative substitutions are said to have “sequence similarity” or “similarity”. Means for making this adjustment are well known to those of skill in the art. Typically, this involves scoring a conservative substitution as a partial rather than a full mismatch, thereby increasing the percentage sequence identity. Thus, for example, where an identical amino acid is given a score of 1 and a non-conservative substitution is given a score of zero, a conservative substitution is given a score between zero and 1. The scoring of conservative substitutions is calculated, e.g., as implemented in the program PC/GENE (Intelligenetics, Mountain View, California).

[0138] As used herein, “percentage of sequence identity” means the value determined by comparing two optimally aligned sequences over a comparison window, wherein the portion of the polynucleotide sequence in the comparison window may comprise additions or deletions (i.e., gaps) as compared to the reference sequence (which does not comprise additions or deletions) for optimal alignment of the two sequences. The percentage is calculated by determining the number of positions at which the identical nucleic acid base or amino acid residue occurs in both sequences to yield the number of matched positions, dividing the number of matched positions by the total number of positions in the window of comparison, and multiplying the result by 100 to yield the percentage of sequence identity.

[0139] Unless otherwise stated, sequence identity/similarity values provided herein refer to the value obtained using GAP Version 10 using the following parameters: % identity and % similarity for a nucleotide sequence using GAP Weight of 50 and Length Weight of 3, and the nwsgapdna.cmp scoring matrix; % identity and % similarity for an amino acid sequence using GAP Weight of 8 and Length Weight of 2, and the BLOSUM62 scoring matrix; or any equivalent program thereof. By “equivalent program” is intended any sequence comparison program that, for any two sequences in question, generates an alignment having identical nucleotide or amino acid residue matches and an identical percent sequence identity when compared to the corresponding alignment generated by GAP Version 10.

[0140] Two sequences are “optimally aligned” when they are aligned for similarity scoring using a defined amino acid substitution matrix (e.g., BLOSUM62), gap existence penalty and gap extension penalty so as to arrive at the highest score possible for that pair of sequences. Amino acid substitution matrices and their use in quantifying the similarity between two sequences are well-known in the art and described, e.g., in Dayhoff et al. (1978) “A model of evolutionary change in proteins.” In “Atlas of Protein Sequence and Structure,” Vol. 5, Suppl. 3 (ed. M. 0. Dayhoff), pp. 345-352. Natl. Biomed. Res. Found., Washington, D.C. and Henikoff et al. (1992) Proc. Natl. Acad. Sci. USA 89:10915-10919. The BLOSUM62 matrix is often used as a default scoring substitution matrix in sequence alignment protocols. The gap existence penalty is imposed for the introduction of a single amino acid gap in one of the aligned sequences, and the gap extension penalty is imposed for each additional empty amino acid position inserted into an already opened gap. The alignment is defined by the amino acids positions of each sequence at which the alignment begins and ends, and optionally by the insertion of a gap or multiple gaps in one or both sequences, so as to arrive at the highest possible score. While optimal alignment and scoring can be accomplished manually, the process is facilitated by the use of a computer-implemented alignment algorithm, e.g., gapped BLAST 2.0, described in Altschul et al. (1997) Nucleic Acids Res. 25:3389-3402, and made available to the public at the National Center for Biotechnology Information Website (www.ncbi.nlm.nih.gov). Optimal alignments, including multiple alignments, can be prepared using, e.g., PSI-BLAST, available through www.ncbi.nlm.nih.gov and described by Altschul et al. (1997) Nucleic Acids Res. 25:3389-3402.

[0141] With respect to an amino acid sequence that is optimally aligned with a reference sequence, an amino acid residue “corresponds to” the position in the reference sequence with which the residue is paired in the alignment. The “position” is denoted by a number that sequentially identifies each amino acid in the reference sequence based on its position relative to the N-terminus. Owing to deletions, insertion, truncations, fusions, etc., that must be taken into account when determining an optimal alignment, in general the amino acid residue number in a test sequence as determined by simply counting from the N-terminal will not necessarily be the same as the number of its corresponding position in the reference sequence. For example, in a case where there is a deletion in an aligned test sequence, there will be no amino acid that corresponds to a position in the reference sequence at the site of deletion. Where there is an insertion in an aligned reference sequence, that insertion will not correspond to any amino acid position in the reference sequence. In the case of truncations or fusions there can be stretches of amino acids in either the reference or aligned sequence that do not correspond to any amino acid in the corresponding sequence.

### VI. Antibodies

[0142] Antibodies to the USPs, fusion proteins, or ribonucleoproteins comprising the USPs of the present invention, including those having the amino acid sequence set forth as SEQ ID NOs: 1-16 or active variants or fragments thereof, are also encompassed. Methods for producing antibodies are well known in the art (see, for example, Harlow and Lane (1988) Antibodies: A Laboratory Manual, Cold Spring Harbor Laboratory, Cold Spring Harbor, N.Y.; and U.S. Pat. No. 4,196,265). These antibodies can be used in kits for the detection and isolation of USPs or fusion proteins or ribonucleoproteins comprising USPs described herein. Thus, this disclosure provides kits comprising antibodies that specifically bind to the polypeptides or ribonucleoproteins described herein, including, for example, polypeptides comprising a sequence of at least 85% identity to any of SEQ ID NOs: 1-16.

### VII. Systems and Ribonucleoprotein Complexes for Binding a Target Sequence of Interest and Methods of Making the Same

[0143] The present disclosure provides a system which targets to a nucleic acid sequence and modifies a target nucleic acid sequence. In some embodiments, an RNA-guided, DNA-binding polypeptide, such as an RGN, and the gRNA are responsible for targeting the ribonucleoprotein complex to a nucleic acid sequence of interest; the deaminase polypeptide is responsible for modifying the targeted nucleic acid sequence from C>U; the uracil stabilizing polypeptide allows the uracil to persist in the DNA molecule so that the desired DNA repair occurs, thereby introducing the C>T mutation. The guide RNA hybridizes to the target sequence of interest and also forms a complex with the RNA-guided, DNA-binding polypeptide, thereby directing the RNA-guided, DNA-binding polypeptide to bind to the target sequence. The RNA-guided, DNA-binding polypeptide is one domain of a 3-domain fusion protein; the second domain is a deaminase, and the third domain is a USP described herein. In some embodiments, the RNA-guided, DNA-binding polypeptide is an RGN, such as a Cas9. Other examples of RNA-guided, DNA-binding polypeptides include RGNs such as those described in U.S. Patent Application Publication No. 2019/0367949 (herein incorporated in its entirety by reference). In some embodiments, the RNA-guided, DNA-binding polypeptide is a Type II CRISPR-Cas polypeptide, or an active variant or fragment thereof. In some embodiments, the RNA-guided, DNA-binding polypeptide is a Type V CRISPR-Cas polypeptide, or an active variant or fragment thereof. In other embodiments, the RNA-guided, DNA-binding polypeptide is a Type VI CRISPR-Cas polypeptide. In other embodiments, the DNA-binding domain of the fusion protein does not require an RNA guide, such as a zinc finger nuclease, TALEN, or meganuclease polypeptide. In some of these embodiments, the nuclease activity of each has been inactivated. In further embodiments, the RNA-guided, DNA-binding polypeptide comprises an amino acid sequence of an RGN, such as an amino acid sequence having at least 80% sequence identity to APG07433.1 (SEQ ID NO: 40) or an active variant or fragment thereof such as nickase APG07433.1 (SEQ ID NO: 41). In further embodiments, the RNA- guided, DNA-binding polypeptide comprises an amino acid sequence of an RGN, such as an amino acid sequence having at least 85% sequence identity to APG07433.1 (SEQ ID NO: 40) or an active variant or fragment thereof such as nickase APG07433.1 (SEQ ID NO: 41). In further embodiments, the RNA-guided, DNA-binding polypeptide comprises an amino acid sequence of an RGN, such as an amino acid sequence 5 having at least 90% sequence identity to APG07433.1 (SEQ ID NO: 40) or an active variant or fragment thereof such as nickase APG07433.1 (SEQ ID NO: 41). In further embodiments, the RNA-guided, DNA-binding polypeptide comprises an amino acid sequence of an RGN, such as an amino acid sequence having at least 95% sequence identity to APG07433.1 (SEQ ID NO: 40) or an active variant or fragment thereof such as nickase APG07433.1 (SEQ ID NO: 41). In further embodiments, the RNA-guided, DNA-binding 10 polypeptide comprises an amino acid sequence of an RGN, such as APG07433.1 (SEQ ID NO: 40) or an active variant or fragment thereof such as nickase APG07433.1 (SEQ ID NO: 41).

[0144] The system for binding a target sequence of interest provided herein can be a ribonucleoprotein complex, which is at least one molecule of an RNA bound to at least one protein. The ribonucleoprotein complexes provided herein comprise at least one guide RNA as the RNA component and a fusion protein 15 comprising a deaminase, a USP of the invention, and an RNA-guided, DNA-binding polypeptide as the protein component. The ribonucleoprotein complex can be purified from a cell or organism that has been transformed with polynucleotides that encode the fusion protein and a guide RNA and cultured under conditions to allow for the expression of the fusion protein and guide RNA. Thus, methods are provided for making a USP, a fusion protein, or a fusion protein ribonucleoprotein complex. Such methods comprise 20 culturing a cell comprising a nucleotide sequence encoding a USP, a fusion protein, and in some embodiments a nucleotide sequence encoding a guide RNA, under conditions in which the USP or fusion protein (and in some embodiments, the guide RNA) is expressed. The USP, fusion protein, or fusion ribonucleoprotein can then be purified from a lysate of the cultured cells.

[0145] Methods for purifying a USP, fusion protein, or fusion ribonucleoprotein complex from a lysate of a 25 biological sample are known in the art (e.g., size exclusion and/or affinity chromatography, 2D-PAGE,

[0146] HPLC, reversed-phase chromatography, immunoprecipitation). In particular methods, the USP or fusion protein is recombinantly produced and comprises a purification tag to aid in its purification, including but not limited to, glutathione-S-transferase (GST), chitin binding protein (CBP), maltose binding protein, thioredoxin (TRX), poly(NANP), tandem affinity purification (TAP) tag, myc, AcV5, AU1, AUS, E, ECS, 30 E2, FLAG, HA, nus, Softag 1, Softag 3, Strep, SBP, Glu-Glu, HSV, KT3, S, 51, T7, V5, VSV-G, 6xHis, biotin carboxyl carrier protein (BCCP), and calmodulin. Generally, the tagged USP, fusion protein, or fusion ribonucleoprotein complex is purified using immunoprecipitation or other similar methods known in the art.

[0147] An “isolated” or “purified” polypeptide, or biologically active portion thereof, is substantially or 35 essentially free from components that normally accompany or interact with the polypeptide as found in its naturally occurring environment. Thus, an isolated or purified polypeptide is substantially free of other cellular material, or culture medium when produced by recombinant techniques, or substantially free of chemical precursors or other chemicals when chemically synthesized. A protein that is substantially free of cellular material includes preparations of protein having less than about 30%, 20%, 10%, 5%, or 1% (by dry weight) of contaminating protein. When the protein of the invention or biologically active portion thereof is recombinantly produced, optimally culture medium represents less than about 30%, 20%, 10%, 5%, or 1% (by dry weight) of chemical precursors or non-protein-of-interest chemicals.

### VIII. Methods ofModifying a Target Sequence

[0148] The present disclosure provides methods for modifying a target nucleic acid molecule (e.g., target DNA molecule) of interest. The methods include delivering a system comprising at least one guide RNA or a polynucleotide encoding the same, and at least one fusion protein comprising a USP of the invention, a deaminase, and an RNA-guided, DNA-binding polypeptide or a polynucleotide encoding the same to the target sequence or a cell, organelle, or embryo comprising the target sequence. In some of these embodiments, the fusion protein comprises any one of the amino acid sequences of SEQ ID NOs: 1-16, or an active variant or fragment thereof.

[0149] In some embodiments, the methods comprise contacting a DNA molecule with (a) a fusion protein comprising a USP, a deaminase, and an RNA-guided, DNA-binding polypeptide, such as for example a nuclease-inactive or a nickase Cas9 domain; and (b) a gRNA targeting the fusion protein of (a) to a target nucleotide sequence of the DNA molecule; wherein the DNA molecule is contacted with the fusion protein and the gRNA in an amount effective and under conditions suitable for the deamination of a nucleotide base.

[0150] In some embodiments, the target DNA molecule comprises a sequence associated with a disease or disorder, and wherein the deamination of the nucleotide base results in a sequence that is not associated with a disease or disorder. In some embodiments, the disease or disorder affects animals. In further embodiments, the disease or disorder affects mammals, such as humans, cows, horses, dogs, cats, goats, sheep, swine, monkeys, rats, mice, or hamsters. In some embodiments, the target DNA sequence resides in an allele of a crop plant, wherein the particular allele of the trait of interest results in a plant of lesser agronomic value. The deamination of the nucleotide base results in an allele that improves the trait and increases the agronomic value of the plant.

[0151] In some embodiments, the desired mutation comprises a T→C point mutation associated with a disease or disorder, and wherein the deamination of the mutant C base results in a sequence that is not associated with a disease or disorder. In some embodiments, the deamination corrects a point mutation in the sequence associated with the disease or disorder.

[0152] In some embodiments, the sequence associated with the disease or disorder encodes a protein, and wherein the deamination introduces a stop codon into the sequence associated with the disease or disorder, resulting in a truncation of the encoded protein. In some embodiments, the contacting is performed in vivo in a subject susceptible to having, having, or diagnosed with the disease or disorder. In some embodiments, the disease or disorder is a disease associated with a point mutation, or a single-base mutation, in the genome. In some embodiments, the disease is a genetic disease, a cancer, a metabolic disease, or a lysosomal storage disease.

[0153] Thus, the presently disclosed compositions and methods can be used for the treatment of a disease or a disorder associated with a sequence (i.e., the sequence is causal for the disease or disorder or causal for symptoms associated with the disease or disorder) that is mutated in order to treat the disease or disorder or the reduction of symptoms associated with the disease or disorder. As used herein, the term “treat” or “treatment” refers to the administration of a pharmaceutical composition disclosed herein comprising a USP or a fusion protein, to a subject having a disease or disorder. Treatment can be prophylactic by preventing the onset of symptoms associated with a disease or disorder in a subject susceptible to the disease or disorder (e.g., genetically predisposed). Desirable effects of treatment include, but are not limited to, preventing occurrence or recurrence of disease, alleviation of symptoms, diminishment of any direct or indirect pathological consequences of the disease, decreasing the rate of disease progression, amelioration or palliation of the disease state, and remission or improved prognosis.

[0154] A pharmaceutical composition is a composition that is employed to prevent, reduce in intensity, cure or otherwise treat a disease or disorder that comprises an active ingredient (i.e., a USP or fusion protein or nucleic acid molecule encoding the same) and a pharmaceutically acceptable carrier. A pharmaceutically acceptable carrier refers to one or more compatible solid or liquid filler, diluents or encapsulating substances which are suitable for administration to a human or other vertebrate animal. In some embodiments, the pharmaceutical composition comprises a pharmaceutically acceptable carrier that is non-naturally occurring.

[0155] Pharmaceutical compositions used in the presently disclosed methods can be formulated with suitable carriers, excipients, and other agents that provide suitable transfer, delivery, tolerance, and the like. A multitude of appropriate formulations are known to those skilled in the art. Non-limiting examples include a sterile diluent such as water for injection, saline solution, fixed oils, polyethylene glycols, glycerine, propylene glycol or other synthetic solvents; antibacterial agents such as benzyl alcohol or methyl parabens; antioxidants such as ascorbic acid or sodium bisulfate; chelating agents such as ethylenediaminetetraacetic acid; buffers such as acetates, citrates or phosphates and agents for the adjustment of tonicity such as sodium chloride or dextrose. Administered intravenously, particular carriers are physiological saline or phosphate buffered saline (PBS). Pharmaceutical compositions for oral or parenteral use may be prepared into dosage forms in a unit dose suited to fit a dose of the active ingredients. Such dosage forms in a unit dose include, for example, tablets, pills, capsules, injections (ampoules), suppositories, etc. These compositions also may contain adjuvants including preservative agents, wetting agents, emulsifying agents, and dispersing agents. Prevention of the action of microorganisms may be ensured by various antibacterial and antifungal agents, for example, parabens, chlorobutanol, phenol, sorbic acid, and the like. It also may be desirable to include isotonic agents, for example, sugars, sodium chloride and the like. Prolonged absorption of the injectable pharmaceutical form may be brought about by the use of agents delaying absorption, for example, aluminum monostearate and gelatin.

[0156] Pharmaceutical compositions comprising the USP or fusion proteins or nucleic acid molecules encoding the same or cells comprising the same can be administered to a subject via any route, such as orally, buccally, parenterally, topically, by inhalation or insufflation (i.e., through the mouth or through the nose), or rectally. Administering can be performed, for example, once, a plurality of times, and/or over one or more extended periods.

[0157] An effective amount of a pharmaceutical composition of the invention is any amount that is effective to achieve its purpose (e.g., prevention of or recovery from, including partial recovery, or prevention or slowing of disorder or disease caused by a specific sequence). The effective amount, usually expressed in mg/kg can be determined by routine methods during pre-clinical and clinical trials by those of skill in the art.

[0158] In those embodiments wherein the method comprises delivering a polynucleotide encoding a guide RNA and/or a fusion protein, the cell or embryo can then be cultured under conditions in which the guide RNA and/or fusion protein are expressed. In various embodiments, the method comprises contacting a target sequence with a ribonucleoprotein complex comprising a gRNA and a fusion protein (which comprises a USP of the invention, a deaminase, and an RNA-guided DNA-binding polypeptide). In certain embodiments, the method comprises introducing into a cell, organelle, or embryo comprising a target sequence a ribonucleoprotein complex of the invention. The ribonucleoprotein complex of the invention can be one that has been purified from a biological sample, recombinantly produced and subsequently purified, or in vitro-assembled as described herein. In those embodiments wherein the ribonucleoprotein complex that is contacted with the target sequence or a cell organelle, or embryo has been assembled in vitro, the method can further comprise the in vitro assembly of the complex prior to contact with the target sequence, cell, organelle, or embryo.

[0159] A purified or in vitro assembled ribonucleoprotein complex of the invention can be introduced into a cell, organelle, or embryo using any method known in the art, including, but not limited to electroporation. Alternatively, a fusion protein comprising a USP of the invention, a deaminase, and a RNA-guided, DNA-binding polypeptide, and a polynucleotide encoding or comprising the guide RNA can be introduced into a cell, organelle, or embryo using any method known in the art (e.g., electroporation).

[0160] Upon delivery to or contact with the target sequence or cell, organelle, or embryo comprising the target sequence, the guide RNA directs the fusion protein to bind to the target sequence in a sequence-specific manner. The target sequence can subsequently be modified via the deaminase domain and the USP domain of the fusion protein. In some embodiments, the binding of this fusion protein to a target sequence results in modification of a nucleotide adjacent to the target sequence. The nucleotide base adjacent to the target sequence may be 1, 2, 3, 4, 5, 6, 7, 8, 9, 10, 11, 12, 13, 14, 15, 16, 17, 18, 19, 20, 25, 30, 35, 40, 45, 35 50, 55, 60, 65, 70, 75, 80, 85, 90, 95, or 100 base pairs from the 5′ or 3′ end of the target sequence. A fusion protein comprising a USP of the invention, a deaminase, and a RNA-guided, DNA-binding polypeptide can introduce targeted C>T mutations with greater efficiency compared to a fusion protein which comprises a deaminase and an RNA-guided, DNA-binding polypeptide alone.

[0161] Methods to measure binding of the fusion protein to a target sequence are known in the art and include chromatin immunoprecipitation assays, gel mobility shift assays, DNA pull-down assays, reporter assays, microplate capture and detection assays. Likewise, methods to measure cleavage or modification of a target sequence are known in the art and include in vitro or in vivo cleavage assays wherein cleavage is confirmed using PCR, sequencing, or gel electrophoresis, with or without the attachment of an appropriate label (e.g., radioisotope, fluorescent substance) to the target sequence to facilitate detection of degradation products. Alternatively, the nicking triggered exponential amplification reaction (NTEXPAR) assay can be used (see, e.g., Zhang et al. (2016) Chem. Sci. 7:4951-4957). In vivo cleavage can be evaluated using the Surveyor assay (Guschin et al. (2010) Methods Mol Biol 649:247-256).

[0162] In some embodiments, the methods involve the use of a RNA-binding, DNA-guided domain, as part of the fusion protein, complexed with more than one guide RNA. The more than one guide RNA can target different regions of a single gene or can target multiple genes. This multiple targeting enables the deaminase domain of the fusion protein to modify nucleic acids, thereby introducing multiple mutations in the target nucleic acid molecule (e.g., genome) of interest. The USP domain of the fusion protein increases the efficacy of introduction of the desired mutations.

[0163] In those embodiments wherein the method involves the use of an RNA-guided nuclease (RGN), such as a nickase RGN (i.e., is only able to cleave a single strand of a double-stranded polynucleotide, for example nAPG07433.1 (SEQ ID NO: 41)), the method can comprise introducing two different RGNs or RGN variants that target identical or overlapping target sequences and cleave different strands of the polynucleotide. For example, an RGN nickase that only cleaves the positive (+) strand of a double-stranded polynucleotide can be introduced along with a second RGN nickase that only cleaves the negative (−) strand of a double-stranded polynucleotide. Alternatively, two different fusion proteins may be provided, where each fusion protein comprises a different RGN with a different PAM recognition sequence, so that a greater diversity of nucleotide sequences may be targeted for mutation.

[0164] One of ordinary skill in the art will appreciate that any of the presently disclosed methods can be used to target a single target sequence or multiple target sequences. Thus, methods comprise the use of a fusion protein comprising a single RNA-guided, DNA-binding polypeptide in combination with multiple, distinct guide RNAs, which can target multiple, distinct sequences within a single gene and/or multiple genes. The deaminase domain of the fusion protein would then introduce mutations at each of the targeted sequences. The USP domain of the fusion protein increases the efficacy of introduction of the desired mutations. Also encompassed herein are methods wherein multiple, distinct guide RNAs are introduced in combination with multiple, distinct RNA-guided, DNA binding polypeptides. Such RNA-guided, DNA-binding polypeptides may be multiple RGN or RGN variants. These guide RNAs and guide RNA/fusion protein systems can target multiple, distinct sequences within a single gene and/or multiple genes.

### IX. Cells Comprising a Polynucleotide Genetic Modification

[0165] Some embodiments provide methods for using the fusion proteins provided herein. In some embodiments, the fusion protein is used to introduce a point mutation into a target nucleic acid molecule by deaminating a target nucleobase, e.g., a C residue. In some embodiments, the deamination of the target nucleobase results in the correction of a genetic defect, e.g., in the correction of a point mutation that leads to a loss of function in a gene product. In some embodiments, the genetic defect is associated with a disease or disorder, e.g., a lysosomal storage disorder or a metabolic disease, such as, for example, type I diabetes. In some embodiments, the methods provided herein are used to introduce a deactivating point mutation into a gene or allele that encodes a gene product that is associated with a disease or disorder. For example, in some embodiments, methods are provided herein that employ a fusion protein to introduce a deactivating point mutation into an oncogene (e.g., in the treatment of a proliferative disease). A deactivating mutation may, in some embodiments, generate a premature stop codon in a coding sequence, which results in the expression of a truncated gene product, e.g., a truncated protein lacking the function of the full-length protein. In some embodiments, the purpose of the methods provide herein is to restore the function of a dysfunctional gene via genome editing. The fusion proteins provided herein can be validated for gene editing-based human therapeutics in vitro, e.g., by correcting a disease associated mutation in human cell culture. It will be understood by the skilled artisan that the fusion proteins provided herein, e.g., the fusion proteins comprising a RNA-guided, DNA-binding domain, a deaminase domain, and a USP of the invention can be used to correct any single point C>T mutation. Deamination of the mutant C to U leads to a correction of the mutation.

[0166] In some embodiments, a fusion protein comprising an RNA-guided, DNA-binding domain, a deaminase domain, and a USP of the invention may be used for generating mutations in a targeted gene or targeted region of a gene of interest. In some embodiments, a fusion protein of the invention may be used for saturate mutagenesis of a targeted gene or region of a targeted gene of interest followed by high-throughput forward genetic screening to identify novel mutations and/or phenotypes. In other embodiments, a fusion protein described herein may be used for generating mutations in a targeted genomic location, which may or may not comprise coding DNA sequence. Libraries of cell lines generated by the targeted mutagenesis described above may also be useful for study of gene function or gene expression.

[0167] Fusion proteins of the invention may also be used to efficiently generate knock-out (KO) lines, including entire libraries of KO lines, through targeted insertion of nonsense mutations. Fusion proteins comprising a RNA-guided, DNA-binding domain, a deaminase domain, and a USP of the invention can convert three codons (CAA, CAG, and CGA) into STOP codons (TAG, TAA, or TGA) if targeted to the coding DNA strain, and can convert TGG into a STOP codon if targeted to the non-coding DNA strain. Billon et al (2017, Mol Cell 67: 1068-1079; incorporated by reference herein) provide a database of over 3.4 million guide RNAs in eight eukaryotic species useful for generation STOP codons. Additionally, Kuscu et al (2017, Nature Methods 14(7): 710-714; incorporated by reference herein) identified 260,000 unique i-stop sgRNAs in the human genome which can target nearly 17,000 genes to introduce early stop codons. In some embodiments, the KO lines are eukaryotic cells. In other embodiments, the KO lines are prokaryotic cells. In some embodiments, the KO lines generated using a fusion protein of the invention are human cell lines. In other embodiments, the KO lines are mammalian cell lines, for example mouse, rat, monkey, cat, dog, cow, pig, sheep, or horse cell lines. In other embodiments, the KO lines are avian cells. In other embodiments, the KO lines are insect cells. In other embodiments, the KO lines are microbial cells. In still other embodiments, the KO lines are plant cells. In further embodiments, the KO lines are Arabidopsis, soybean, maize, cotton, tomato, potato, or bean cells. In further embodiments, the cell lines are plant seeds.

[0168] In some embodiments, a fusion protein provided herein may be useful in therapeutic genome editing. For example, a fusion protein comprising a RNA-guided, DNA-binding domain, a deaminase domain, and a USP of the invention may be used to generate targeted nonsense mutations of PCSK9 (proprotein convertase subtilisin/kexin type 9). PCSK9 is involved in lipoprotein homeostasis, and agents which block PCSK9 can lower low-density lipoprotein particle (LDL) concentrations in the blood. Naturally occurring nonsense variants in PCSK9 in individuals result in substantially reduced blood cholesterol levels and reduced risk in coronary heart disease (Cohen et al. (2006) N Engl J Med 354: 1264-1272). Chadwick et al. (2017, Arteriscler Thromb Vasc Biol 37: 1741-1747; incorporated by reference herein) have found that they can successfully introduce targeted C>T mutations into the PCSK9 gene, thereby reducing PCSK9 protein levels and plasma cholesterol levels in mice. In some embodiments, a similar approach may be taken with a fusion protein of the invention. Further, the skilled artisan will understand that the instantly disclosed fusion proteins can be used to correct other point mutations and mutations associated with other cancers and with diseases other than cancer including other proliferative diseases.

[0169] Provided herein are cells and organisms comprising a target nucleic acid molecule of interest that has been modified using a process mediated by a fusion protein, optionally with a gRNA as described herein. In some of these embodiments, the fusion protein comprises a USP comprising an amino acid sequence of any of SEQ ID NOs: 1-16, or an active variant or fragment thereof In some embodiments, the fusion protein comprises a USP comprising an amino acid sequence at least 50%, at least 55%, at least 60%, at least 65%, at least 70%, at least 75%, at least 80%, at least 85%, at least 90%, at least 95%, at least 96%, at least 97%, at least 98%, or at least 99% identical to any of SEQ ID NOs: 1-16. In some embodiments, the fusion protein further comprises a deaminase and a RNA-guided, DNA-binding polypeptide. In further embodiments, the fusion protein comprises a deaminase and an RGN or a variant thereof, such as an amino acid sequence having at least 80% sequence identity to APG07433.1 (SEQ ID NO: 40) or its nickase variant nAPG07433.1 (SEQ ID NO: 41). In further embodiments, the fusion protein comprises a deaminase and an RGN or a variant thereof, such as an amino acid sequence having at least 85% sequence identity to APG07433.1 (SEQ ID NO: 40) or its nickase variant nAPG07433.1 (SEQ ID NO: 41). In further embodiments, the fusion protein comprises a deaminase and an RGN or a variant thereof, such as an amino acid sequence having at least 90% sequence identity to APG07433.1 (SEQ ID NO: 40) or its nickase variant nAPG07433.1 (SEQ ID NO: 41). In further embodiments, the fusion protein comprises a deaminase and an RGN or a variant thereof, such as an amino acid sequence having at least 95% sequence identity to APG07433.1 (SEQ ID NO: 40) or its nickase variant nAPG07433.1 (SEQ ID NO: 41). In further embodiments, the fusion protein comprises a deaminase and an RGN or a variant thereof, such as APG07433.1 (SEQ ID NO: 40) or its nickase variant nAPG07433.1 (SEQ ID NO: 41). In other embodiments, the fusion protein comprises a deaminase and a Cas9 or a variant thereof, such as for example dCas9 or nickase Cas9. In some embodiments, the fusion protein comprises a nuclease-inactive or nickase variant of a Type II CRISPR-Cas polypeptide. In other embodiments, the fusion protein comprises a nuclease-inactive or nickase variant of a Type V CRISPR-Cas polypeptide. In still other embodiments, the fusion protein comprises a nuclease-inactive or nickase variant of a Type VI CRISPR-Cas polypeptide.

[0170] The modified cells can be eukaryotic (e.g., mammalian, plant, insect, avian cell) or prokaryotic. Also provided are organelles and embryos comprising at least one nucleotide sequence that has been modified by a process utilizing a fusion protein as described herein. The genetically modified cells, organisms, organelles, and embryos can be heterozygous or homozygous for the modified nucleotide sequence.

[0171] The mutation(s) introduced by the deaminase domain of the fusion protein can result in altered expression (up-regulation or down-regulation), inactivation, or the expression of an altered protein product or an integrated sequence. In those instances wherein the mutation(s) results in either the inactivation of a gene or the expression of a non-functional protein product, the genetically modified cell, organism, organelle, or embryo is referred to as a “knock out”. The knock out phenotype can be the result of a deletion mutation (i.e., deletion of at least one nucleotide), an insertion mutation (i.e., insertion of at least one nucleotide), or a nonsense mutation (i.e., substitution of at least one nucleotide such that a stop codon is introduced).

[0172] In other embodiments, the mutation(s) introduced by the deaminase domain of the fusion protein results in the production of a variant protein product. The expressed variant protein product can have at least one amino acid substitution and/or the addition or deletion of at least one amino acid. The variant protein product can exhibit modified characteristics or activities when compared to the wild-type protein, including but not limited to altered enzymatic activity or substrate specificity.

[0173] In yet other embodiments, the mutation(s) introduced by the deaminase domain of the fusion protein can result in an altered expression pattern of a protein. As a non-limiting example, mutation(s) in the regulatory regions controlling the expression of a protein product can result in the overexpression or downregulation of the protein product or an altered tissue or temporal expression pattern.

[0174] Some aspects of this disclosure provide kits comprising a fusion protein comprising an RNA-guided, DNA-binding polypeptide, such as an RGN polypeptide, for example a nuclease-inactive Cas9 domain, and a deaminase of the invention, and, optionally, a linker positioned between the Cas9 domain and the deaminase. In addition, in some embodiments, the kit comprises suitable reagents, buffers, and/or instructions for using the fusion protein, e.g., for in vitro or in vivo DNA or RNA editing. In some embodiments, the kit comprises instructions regarding the design and use of suitable gRNAs for targeted editing of a nucleic acid sequence.

### X. Additional Applications of USPs

[0175] USPs described herein also possess utility beyond genomic base editing. In general, USPs are useful in applications where stabilizing a uracil nucleobase in a DNA molecule is desired. Through a natural process or by the hand of man, a uracil may be introduced into genomic DNA by DNA damage caused by reactive oxygen species, ionizing radiation, and/or alkylating agents. Studies on the mechanisms of DNA repair, such as the base excision repair (BER) pathway, or studies which measure DNA repair capacity, may use a USP of the invention to inhibit repair of the uracil.

[0176] Additionally, USPs described herein may be useful for the treatment of various cancers. For example, fluoropyrimidines including 5-fluorouracil (5-FU) and its deoxyribonucleoside metabolite 5-fluorodeoxyuridine (5-FdU) have been widely used in the treatment of various solid tumors, including colorectal cancer. 5-FdU is active through the inhibition of thymidylate synthase, which consequently introduces uracil and 5-FU incorporation into the genome of the cell. As described above, base repair enzymes such as UDG recognize uracil nucleobases in the genomic DNA and remove them. Yan et al (2016; Oncotarget 7 (37): 59299-59313) found that UDG depleted cells were arrested and displayed sustained DNA damage following 5-FdU treatment, indicating that UDG's actions in removal of uracil and 5-FU played a role in the effectiveness of the 5-FdU treatment of the tumor. Delivery of a USP of the invention in combination with fluoropyrimidines may enhance the effectiveness of this treatment of tumors. Thus, pharmaceutical compositions comprising a presently disclosed USP and a fluoropyrimidine are provided, along with methods of treating a cancer with effective amounts of such pharmaceutical compositions. Fluoropyrimidines are a class of anti-cancer antimetabolites that includes capecitabine, carmofur, doxifluridine, fluorouracil, 5-fluorodeoxyuridine, and tegafur.

[0177] The article “a” and “an” are used herein to refer to one or more than one (i.e., to at least one) of the grammatical object of the article. By way of example, “a polypeptide” means one or more polypeptides.

[0178] All publications and patent applications mentioned in the specification are indicative of the level of those skilled in the art to which this disclosure pertains. All publications and patent applications are herein incorporated by reference to the same extent as if each individual publication or patent application was specifically and individually indicated to be incorporated by reference.

[0179] Although the foregoing invention has been described in some detail by way of illustration and example for purposes of clarity of understanding, it will be obvious that certain changes and modifications may be practiced within the scope of the appended claims.

[0180] Non-limiting embodiments include:

[0181] 1. An isolated polypeptide comprising an amino acid sequence having:
[0182] a) at least 80% sequence identity to any one of SEQ ID NOs: 1, 2, 4, 5, and 7-15;
[0183] b) at least 81% sequence identity to SEQ ID NO: 3 or 16; or
[0184] c) at least 82% sequence identity to SEQ ID NO: 6;
[0185] wherein said polypeptide has uracil stabilizing activity and wherein said polypeptide further comprises a heterologous amino acid sequence.

[0186] 2. The isolated polypeptide of embodiment 1, wherein the amino acid sequence has at least 85% sequence identity to any one of SEQ ID NOs: 1-16.

[0187] 3. The isolated polypeptide of embodiment 1, wherein the amino acid sequence has at least 90% sequence identity to any one of SEQ ID NOs: 1-16.

[0188] 4. The isolated polypeptide of embodiment 1, wherein the amino acid sequence has at least 95% sequence identity to any one of SEQ ID NOs: 1-16.

[0189] 5. The isolated polypeptide of embodiment 1, wherein the amino acid sequence has 100% sequence identity to any one of SEQ ID NOs: 1-16.

[0190] 6. The isolated polypeptide of embodiment 1, wherein the polypeptide has the sequence of any one of SEQ ID NOs: 33-39.

[0191] 7. A pharmaceutical composition comprising a non-naturally occurring pharmaceutically acceptable carrier and a polypeptide comprising an amino acid sequence having:
[0192] a) at least 80% sequence identity to any one of SEQ ID NOs: 1, 2, 4, 5, and 7-15;
[0193] b) at least 81% sequence identity to SEQ ID NO: 3 or 16; or
[0194] c) at least 82% sequence identity to SEQ ID NO: 6;
[0195] wherein said polypeptide has uracil stabilizing activity.

[0196] 8. The pharmaceutical composition of embodiment 7, wherein the polypeptide comprises an amino acid sequence having at least 85% sequence identity to any one of SEQ ID NOs: 1-16.

[0197] 9. The pharmaceutical composition of embodiment 7, wherein the polypeptide comprises an amino acid sequence having at least 90% sequence identity to any one of SEQ ID NOs: 1-16.

[0198] 10. The pharmaceutical composition of embodiment 7, wherein the polypeptide comprises an amino acid sequence having at least 95% sequence identity to any one of SEQ ID NOs: 1-16.

[0199] 11. The pharmaceutical composition of embodiment 7, wherein the polypeptide comprises an amino acid sequence having 100% sequence identity to any one of SEQ ID NOs: 1-16.

[0200] 12. A pharmaceutical composition comprising a non-naturally occurring pharmaceutically acceptable carrier and a nucleic acid molecule comprising a polynucleotide encoding a polypeptide comprising an amino acid sequence having:
[0201] a) at least 80% sequence identity to any one of SEQ ID NOs: 1, 2, 4, 5, and 7-15;
[0202] b) at least 81% sequence identity to SEQ ID NO: 3 or 16; or
[0203] c) at least 82% sequence identity to SEQ ID NO: 6;
   wherein said polypeptide has uracil stabilizing activity.

[0204] 13. The pharmaceutical composition of embodiment 12, wherein the polypeptide comprises an amino acid sequence having at least 85% sequence identity to any one of SEQ ID NOs: 1-16.

[0205] 14. The pharmaceutical composition of embodiment 12, wherein the polypeptide comprises an amino acid sequence having at least 90% sequence identity to any one of SEQ ID NOs: 1-16.

[0206] 15. The pharmaceutical composition of embodiment 12, wherein the polypeptide comprises an amino acid sequence having at least 95% sequence identity to any one of SEQ ID NOs: 1-16.

[0207] 16. The pharmaceutical composition of embodiment 12, wherein the polypeptide comprises an amino acid sequence having 100% sequence identity to any one of SEQ ID NOs: 1-16.

[0208] 17. The pharmaceutical composition of embodiment 7 or 12, wherein the polypeptide has the sequence of any one of SEQ ID NOs: 33-39.

[0209] 18. The pharmaceutical composition of any one of embodiments 7-17, further comprising a fluoropyrimidine.

[0210] 19. A nucleic acid molecule comprising a polynucleotide encoding a polypeptide comprising an amino acid sequence having:
[0211] a) at least 80% sequence identity to any one of SEQ ID NOs: 1, 2, 4, 5, and 7-15;
[0212] b) at least 81% sequence identity to SEQ ID NO: 3 or 16; or
[0213] c) at least 82% sequence identity to SEQ ID NO: 6;
[0214] wherein said polypeptide has uracil stabilizing activity; and
[0215] wherein said nucleic acid molecule further comprises a heterologous promoter operably linked to said polynucleotide.

[0216] 20. The nucleic acid molecule of embodiment 19, wherein the polypeptide comprises an amino acid sequence having at least 85% sequence identity to any one of SEQ ID NOs: 1-16.

[0217] 21. The nucleic acid molecule of embodiment 19, wherein the polypeptide comprises an amino acid sequence having at least 90% sequence identity to any one of SEQ ID NOs: 1-16.

[0218] 22. The nucleic acid molecule of embodiment 19, wherein the polypeptide comprises an amino acid sequence having at least 95% sequence identity to any one of SEQ ID NOs: 1-16.

[0219] 23. The nucleic acid molecule of embodiment 19, wherein the polypeptide comprises an amino acid sequence having 100% sequence identity to any one of SEQ ID NOs: 1-16.

[0220] 24. The nucleic acid molecule of embodiment 19, wherein the polypeptide has the sequence of any one of SEQ ID NOs: 33-39.

[0221] 25. A composition comprising a fluoropyrimidine and a polypeptide comprising an amino acid sequence having:
[0222] a) at least 80% sequence identity to any one of SEQ ID NOs: 1, 2, 4, 5, and 7-15;
[0223] b) at least 81% sequence identity to SEQ ID NO: 3 or 16; or
[0224] c) at least 82% sequence identity to SEQ ID NO: 6;
[0225] wherein said polypeptide has uracil stabilizing activity.

[0226] 26. The composition of embodiment 25, wherein the polypeptide comprises an amino acid sequence having at least 85% sequence identity to any one of SEQ ID NOs: 1-16.

[0227] 27. The composition of embodiment 25, wherein the polypeptide comprises an amino acid sequence having at least 90% sequence identity to any one of SEQ ID NOs: 1-16.

[0228] 28. The composition of embodiment 25, wherein the polypeptide comprises an amino acid sequence having at least 95% sequence identity to any one of SEQ ID NOs: 1-16.

[0229] 29. The composition of embodiment 25, wherein the polypeptide comprises an amino acid sequence having 100% sequence identity to any one of SEQ ID NOs: 1-16.

[0230] 30. A composition comprising a fluoropyrimidine and a nucleic acid molecule encoding a polypeptide comprising an amino acid sequence having:
[0231] a) at least 80% sequence identity to any one of SEQ ID NOs: 1, 2, 4, 5, and 7-15;
[0232] b) at least 81% sequence identity to SEQ ID NO: 3 or 16; or
[0233] c) at least 82% sequence identity to SEQ ID NO: 6;
[0234] wherein said polypeptide has uracil stabilizing activity. 31. The composition of embodiment 30, wherein the polypeptide comprises an amino acid sequence having at least 85% sequence identity to any one of SEQ ID NOs: 1-16.

[0235] 32. The composition of embodiment 30, wherein the polypeptide comprises an amino acid sequence having at least 90% sequence identity to any one of SEQ ID NOs: 1-16.

[0236] 33. The composition of embodiment 30, wherein the polypeptide comprises an amino acid sequence having at least 95% sequence identity to any one of SEQ ID NOs: 1-16.

[0237] 34. The composition of embodiment 30, wherein the polypeptide comprises an amino acid sequence having 100% sequence identity to any one of SEQ ID NOs: 1-16.

[0238] 35. The composition of embodiment 25 or 30, wherein the polypeptide has the sequence of any one of SEQ ID NOs: 33-39.

[0239] 36. A fusion protein comprising: (i) a DNA-binding polypeptide; (ii) a deaminase; and (iii) at least one uracil stabilizing polypeptide (USP) having at least 80% sequence identity to any one of SEQ ID NOs: 1-16.

[0240] 37. The fusion protein of embodiment 36, wherein at least one USP has at least 85% sequence identity to any one of SEQ ID NOs: 1-16.

[0241] 38. The fusion protein of embodiment 36, wherein at least one USP has at least 90% sequence identity to any one of SEQ ID NOs: 1-16.

[0242] 39. The fusion protein of embodiment 36, wherein at least one USP has at least 95% sequence identity to any one of SEQ ID NOs: 1-16.

[0243] 40. The fusion protein of embodiment 36, wherein at least one USP has 100% sequence identity to any one of SEQ ID NOs: 1-16.

[0244] 41. The fusion protein of embodiment 36, wherein the USP has the sequence of any one of SEQ ID NOs: 33-39.

[0245] 42. The fusion protein of embodiment 36 or 41, wherein the deaminase is a cytidine deaminase.

[0246] 43. The fusion protein of embodiment 42, wherein the cytidine deaminase is an activation-induced cytidine deaminase (AID) or a member of the apolipoprotein B mRNA-editing complex (APOBEC) family of deaminases.

[0247] 44. The fusion protein of embodiment 43, wherein the cytidine deaminase comprises an amino acid sequence having at least 80% sequence identity to any one of SEQ ID NOs: 47, 48 and 76-94.

[0248] 45. The fusion protein of embodiment 43, wherein the cytidine deaminase comprises an amino acid sequence having at least 85% sequence identity to any one of SEQ ID NOs: 47, 48 and 76-94.

[0249] 46. The fusion protein of embodiment 43, wherein the cytidine deaminase comprises an amino acid sequence having at least 90% sequence identity to any one of SEQ ID NOs: 47, 48 and 76-94.

[0250] 47. The fusion protein of embodiment 43, wherein the cytidine deaminase comprises an amino acid sequence having at least 95% sequence identity to any one of SEQ ID NOs: 47, 48 and 76-94.

[0251] 48. The fusion protein of embodiment 43, wherein the cytidine deaminase comprises an amino acid sequence having 100% sequence identity to any one of SEQ ID NOs: 47, 48 and 76-94.

[0252] 49. The fusion protein of any one of embodiments 36-44, wherein the DNA-binding polypeptide is a meganuclease, zinc finger fusion protein, or a TALEN.

[0253] 50. The fusion protein of any one of embodiments 36-44, wherein the DNA-binding polypeptide is an RNA-guided, DNA-binding polypeptide.

[0254] 51. The fusion protein of embodiment 50, wherein the RNA-guided, DNA-binding polypeptide is an RNA-guided nuclease polypeptide (RGN).

[0255] 52. The fusion protein of embodiment 51, wherein the RGN is a Type II CRISPR-Cas polypeptide.

[0256] 53. The fusion protein of embodiment 51, wherein the RGN is a Type V CRISPR-Cas polypeptide.

[0257] 54. The fusion protein of embodiment 51, wherein the RGN comprises an amino acid sequence having at least 80% sequence identity to any one of SEQ ID NOs: 40 and 95-142.

[0258] 55. The fusion protein of embodiment 51, wherein the RGN comprises an amino acid sequence having at least 85% sequence identity to ay one of SEQ ID NOs: 40 and 95-142.

[0259] 56. The fusion protein of embodiment 51, wherein the RGN comprises an amino acid sequence having at least 90% sequence identity to any one of SEQ ID NOs: 40 and 95-142.

[0260] 57. The fusion protein of embodiment 51, wherein the RGN comprises an amino acid sequence having at least 95% sequence identity to any one of SEQ ID NOs: 40 and 95-142.

[0261] 58. The fusion protein of embodiment 51, wherein the RGN comprises an amino acid sequence having 100% sequence identity to any one of SEQ ID NOs: 40 and 95-142.

[0262] 59. The fusion protein of any one of embodiments 51-58, wherein the RGN is an RGN nickase.

[0263] 60. The fusion protein of any one of embodiments 51-59, wherein the fusion protein comprises an RGN, a cytidine deaminase, and a USP.

[0264] 61. The fusion protein of embodiment 60, wherein the fusion protein comprises an RGN having at least 80% sequence identity to any one of SEQ ID NOs: 40, 41, and 95-142, a cytidine deaminase having at least 80% sequence identity to any one of SEQ ID NOs: 47, 48, and 76-94, and a USP having at least 80% sequence identity to any one of SEQ ID NOs: 1-16.

[0265] 62. The fusion protein of embodiment 60, wherein the fusion protein comprises an RGN having at least 85% sequence identity to any one of SEQ ID NOs: 40, 41, and 95-142, a cytidine deaminase having at least 85% sequence identity to any one of SEQ ID NOs: 47, 48, and 76-94, and a USP having at least 85% sequence identity to any one of SEQ ID NOs: 1-16.

[0266] 63. The fusion protein of embodiment 60, wherein the fusion protein comprises an RGN having at least 90% sequence identity to any one of SEQ ID NOs: 40, 41, and 95-142, a cytidine deaminase having at least 90% sequence identity to any one of SEQ ID NOs: 47, 48, and 76-94, and a USP having at least 90% sequence identity to any one of SEQ ID NOs: 1-16.

[0267] 64. The fusion protein of embodiment 60, wherein the fusion protein comprises an RGN having at least 95% sequence identity to any one of SEQ ID NOs: 40, 41, and 95-142, a cytidine deaminase having at least 95% sequence identity to any one of SEQ ID NOs: 47, 48, and 76-94, and a USP having at least 95% sequence identity to any one of SEQ ID NOs: 1-16.

[0268] 65. The fusion protein of embodiment 60, wherein the fusion protein comprises an RGN having 100% sequence identity to any one of SEQ ID NOs: 40, 41, and 95-142, a cytidine deaminase having 100% sequence identity to any one of SEQ ID NOs: 47, 48, and 76-94, and a USP having 100% sequence identity to any one of SEQ ID NOs: 1-16.

[0269] 66. The fusion protein of any of embodiments 36-66, wherein the fusion protein further comprises at least one nuclear localization signal (NLS).

[0270] 67. A nucleic acid molecule comprising a polynucleotide encoding a fusion protein comprising: (i) a DNA-binding polypeptide; (ii) a deaminase; and (iii) at least one uracil stabilizing polypeptide (USP), wherein the USP is encoded by a nucleotide sequence that:
[0271] a) has at least 80% sequence identity to any one of SEQ ID NOs: 17-32,
[0272] b) is set forth in any one of SEQ ID NOs: 17-32,
[0273] c) encodes an amino acid sequence at least 80% identical to SEQ ID NOs: 1-16 and further possesses the sequence of any one of SEQ ID NOs: 33-39,
[0274] d) encodes an amino acid sequence at least 80% identical to an amino acid sequence set forth in any one of SEQ ID NOs: 1-16, or
[0275] e) encodes an amino acid sequence set forth in any one of SEQ ID NOs: 1-16.

[0276] 68. The nucleic acid molecule of embodiment 67, wherein the USP is encoded by a nucleotide sequence that:
[0277] a) has at least 85% sequence identity to any one of SEQ ID NOs: 17-32,
[0278] b) is set forth in any one of SEQ ID NOs: 17-32,
[0279] c) encodes an amino acid sequence at least 85% identical to SEQ ID NOs: 1-16 and further possesses the sequence of any one of SEQ ID NOs: 33-39,
[0280] d) encodes an amino acid sequence at least 85% identical to an amino acid sequence set forth in any one of SEQ ID NOs: 1-16, or
[0281] e) encodes an amino acid sequence set forth in any one of SEQ ID NOs: 1-16.

[0282] 69. The nucleic acid molecule of embodiment 67, wherein the USP is encoded by a nucleotide sequence that:
[0283] a) has at least 90% sequence identity to any one of SEQ ID NOs: 17-32,
[0284] b) is set forth in any one of SEQ ID NOs: 17-32,
[0285] c) encodes an amino acid sequence at least 90% identical to SEQ ID NOs: 1-16 and further possesses the sequence of any one of SEQ ID NOs: 33-39,
[0286] d) encodes an amino acid sequence at least 90% identical to an amino acid sequence set forth in any one of SEQ ID NOs: 1-16, or
[0287] e) encodes an amino acid sequence set forth in any one of SEQ ID NOs: 1-16.

[0288] 70. The nucleic acid molecule of embodiment 67, wherein the USP is encoded by a nucleotide sequence that:
[0289] a) has at least 95% sequence identity to any one of SEQ ID NOs: 17-32,
[0290] b) is set forth in any one of SEQ ID NOs: 17-32,
[0291] c) encodes an amino acid sequence at least 95% identical to SEQ ID NOs: 1-16 and further possesses the sequence of any one of SEQ ID NOs: 33-39,
[0292] d) encodes an amino acid sequence at least 95% identical to an amino acid sequence set forth in any one of SEQ ID NOs: 1-16, or
[0293] e) encodes an amino acid sequence set forth in any one of SEQ ID NOs: 1-16.

[0294] 71. The nucleic acid molecule of embodiment 67, wherein the USP is encoded by a nucleotide sequence that:
[0295] a) is set forth in any one of SEQ ID NOs: 17-32,
[0296] b) encodes an amino acid sequence 100% identical to SEQ ID NOs: 1-16 and further possesses the sequence of any one of SEQ ID NOs: 33-39, or
[0297] c) encodes an amino acid sequence set forth in any one of SEQ ID NOs: 1-16.

[0298] 72. The nucleic acid molecule of embodiment 67, wherein the deaminase is a cytidine deaminase.

[0299] 73. The nucleic acid molecule of embodiment 72, wherein the cytidine deaminase is an activation-induced cytidine deaminase (AID) or a member of the apolipoprotein B mRNA-editing complex (APOBEC) family of deaminases.

[0300] 74. The nucleic acid molecule of embodiment 73, wherein the cytidine deaminase comprises an amino acid sequence having at least 80% sequence identity to any one of SEQ ID NOs: 47, 48 and 76-94.

[0301] 75. The nucleic acid molecule of embodiment 73, wherein the cytidine deaminase comprises an amino acid sequence having at least 85% sequence identity to any one of SEQ ID NOs: 47, 48 and 76-94.

[0302] 76. The nucleic acid molecule of embodiment 73, wherein the cytidine deaminase comprises an amino acid sequence having at least 90% sequence identity to any one of SEQ ID NOs: 47, 48 and 76-94.

[0303] 77. The nucleic acid molecule of embodiment 73, wherein the cytidine deaminase comprises an amino acid sequence having at least 95% sequence identity to any one of SEQ ID NOs: 47, 48 and 76-94.

[0304] 78. The nucleic acid molecule of embodiment 73, wherein the cytidine deaminase comprises an amino acid sequence having 100% sequence identity to any one of SEQ ID NOs: 47, 48 and 76-94.

[0305] 79. The nucleic acid molecule of any one of embodiments 67-78, wherein the DNA-binding polypeptide is a meganuclease, zinc finger fusion protein, or a TALEN.

[0306] 80. The nucleic acid molecule of any one of embodiments 67-78, wherein the DNA-binding polypeptide is an RNA-guided, DNA-binding polypeptide.

[0307] 81. The nucleic acid molecule of embodiment 80, wherein the RNA-guided, DNA-binding polypeptide is an RNA-guided nuclease polypeptide (RGN).

[0308] 82. The nucleic acid molecule of embodiment 81, wherein the RGN is a Type II CRISPR-Cas polypeptide.

[0309] 83. The nucleic acid molecule of embodiment 81, wherein the RGN is a Type V CRISPR-Cas polypeptide.

[0310] 84. The nucleic acid molecule of embodiment 81, wherein the RGN comprises an amino acid sequence having at least 80% sequence identity to any one of SEQ ID NOs: 40 and 95-142.

[0311] 85. The nucleic acid molecule of embodiment 82, wherein the RGN comprises an amino acid sequence having at least 85% sequence identity to any one of SEQ ID NOs: 40 and 95-142.

[0312] 86. The nucleic acid molecule of embodiment 81, wherein the RGN comprises an amino acid sequence having at least 90% sequence identity to any one of SEQ ID NOs: 40 and 95-142.

[0313] 87. The nucleic acid molecule of embodiment 81, wherein the RGN comprises an amino acid sequence having at least 95% sequence identity to any one of SEQ ID NOs: 40 and 95-142.

[0314] 88. The nucleic acid molecule of embodiment 81, wherein the RGN comprises an amino acid sequence having 100% sequence identity to any one of SEQ ID NOs: 40 and 95-142.

[0315] 89. The nucleic acid molecule of any one of embodiments 81-88, wherein the RGN is an RGN nickase.

[0316] 90. The nucleic acid molecule of any one of embodiments 81-89, wherein the fusion protein comprises an RGN, a cytidine deaminase, and a USP.

[0317] 91. The nucleic acid molecule of embodiment 90, wherein the fusion protein comprises an RGN having at least 80% sequence identity to any one of SEQ ID NOs: 40, 41, and 95-142, a cytidine deaminase having at least 80% sequence identity to any one of SEQ ID NOs: 47, 48, and 76-94, and a USP having at least 80% sequence identity to any one of SEQ ID NOs: 1-16.

[0318] 92. The nucleic acid molecule of embodiment 90, wherein the fusion protein comprises an RGN having at least 85% sequence identity to any one of SEQ ID NOs: 40, 41, and 95-142, a cytidine deaminase having at least 85% sequence identity to any one of SEQ ID NOs: 47, 48, and 76-94, and a USP having at least 85% sequence identity to any one of SEQ ID NOs: 1-16.

[0319] 93. The nucleic acid molecule of embodiment 90, wherein the fusion protein comprises an RGN having at least 90% sequence identity to any one of SEQ ID NOs: 40, 41, and 95-142, a cytidine deaminase having at least 90% sequence identity to any one of SEQ ID NOs: 47, 48, and 76-94, and a USP having at least 90% sequence identity to any one of SEQ ID NOs: 1-16.

[0320] 94. The nucleic acid molecule of embodiment 90, wherein the fusion protein comprises an RGN having at least 95% sequence identity to any one of SEQ ID NOs: 40, 41, and 95-142, a cytidine deaminase having at least 95% sequence identity to any one of SEQ ID NOs: 47, 48, and 76-94, and a USP having at least 95% sequence identity to any one of SEQ ID NOs: 1-16.

[0321] 95. The nucleic acid molecule of embodiment 90, wherein the fusion protein comprises an RGN having 100% sequence identity to any one of SEQ ID NOs: 40, 41, and 95-142, a cytidine deaminase having 100% sequence identity to any one of SEQ ID NOs: 47, 48, and 76-94, and a USP having 100% sequence identity to any one of SEQ ID NOs: 1-16.

[0322] 96. The nucleic acid molecule of any of embodiments 67-95, wherein the polynucleotide encoding the fusion protein is operably linked at its 5′ end to a heterologous promoter.

[0323] 97. The nucleic acid molecule of any of embodiments 67-95, wherein the polynucleotide encoding the fusion protein is operably linked at its 3′ end to a heterologous terminator.

[0324] 98. The nucleic acid molecule of any of embodiments 67-97, wherein the fusion protein comprises one or more nuclear localization signals.

[0325] 99. The nucleic acid molecule of any of embodiments 67-98, wherein the fusion protein is codon optimized for expression in a eukaryotic cell.

[0326] 100. The nucleic acid molecule of any of embodiments 67-99, wherein the fusion protein is codon optimized for expression in a prokaryotic cell.

[0327] 101. A vector comprising the nucleic acid molecule of any one of embodiments 67-100.

[0328] 102. A vector comprising the nucleic acid molecule of any one of embodiments 81-95, further comprising at least one nucleotide sequence encoding a guide RNA (gRNA) capable of hybridizing to a target sequence.

[0329] 103. The vector of embodiment 102, wherein the gRNA is a single guide RNA.

[0330] 104. The vector of embodiment 102, wherein the gRNA is a dual guide RNA.

[0331] 105. A cell comprising the fusion protein of any of embodiments 36-66.

[0332] 106. A cell comprising the fusion protein of any one of embodiments 51-66, wherein the cell further comprises a guide RNA.

[0333] 107. A cell comprising the nucleic acid molecule of any of embodiments 67-100.

[0334] 108. A cell comprising the vector of any of embodiments 101 through 104.

[0335] 109. The cell of any one of embodiments 105-108, wherein the cell is a prokaryotic cell.

[0336] 110. The cell of any one of embodiments 105-108, wherein the cell is a eukaryotic cell.

[0337] 111. The cell of embodiment 110, wherein the cell is an insect, avian, or mammalian cell.

[0338] 112. The cell of embodiment 110, wherein the cell is a plant or fungal cell.

[0339] 113. A pharmaceutical composition comprising a pharmaceutically acceptable carrier and the nucleic acid molecule of any one of embodiments 19-24 and 67-100, the composition of any one of embodiments 25-35, the fusion protein of any one of embodiments 36-66, the vector of any one of embodiments 101-104, or the cell of any one of embodiments 105-111.

[0340] 114. A method for making a fusion protein comprising culturing the cell of any one of embodiments 105-112 under conditions in which the fusion protein is expressed.

[0341] 115. A method for making a fusion protein comprising introducing into a cell the nucleic acid molecule of any of embodiments 67-100 or a vector of any one of embodiments 101-104 and culturing the cell under conditions in which the fusion protein is expressed.

[0342] 116. The method of embodiment 114 or 115, further comprising purifying said fusion protein.

[0343] 117. A method for making an RGN fusion ribonucleoprotein complex, comprising introducing into a cell the nucleic acid molecule of any one of embodiments 81-95 and a nucleic acid molecule comprising an expression cassette encoding for a guide RNA, or the vector of any of embodiments 102-104, and culturing the cell under conditions in which the fusion protein and the gRNA are expressed and form an RGN fusion ribonucleoprotein complex.

[0344] 118. The method of embodiment 117, further comprising purifying said RGN fusion ribonucleoprotein complex.

[0345] 119. A system for modifying a target DNA molecule comprising a target DNA sequence, said system comprising:
[0346] a) a fusion protein comprising an RNA-guided nuclease polypeptide (RGN), a cytidine deaminase, and at least one uracil stabilizing polypeptide (USP), wherein the USP is at least 80% identical to any one of SEQ ID NOs: 1-16, or a nucleotide sequence encoding said fusion protein; and
[0347] b) one or more guide RNAs capable of hybridizing to said target DNA sequence or one or more nucleotide sequences encoding the one or more guide RNAs (gRNAs);
[0348] wherein said nucleotide sequences encoding the one or more guide RNAs and encoding the fusion protein are each operably linked to a promoter heterologous to said nucleotide sequence;
[0349] and
[0350] wherein the one or more guide RNAs are capable of forming a complex with the fusion protein in order to direct said fusion protein to bind to said target DNA sequence and modify the target DNA molecule.

[0351] 120. The system of embodiment 119, wherein the USP is at least 85% identical to any one of SEQ ID NOs: 1-16.

[0352] 121. The system of embodiment 119, wherein the USP is at least 90% identical to any one of SEQ ID NOs: 1-16.

[0353] 122. The system of embodiment 119, wherein the USP is at least 95% identical to any one of SEQ ID NOs: 1-16.

[0354] 123. The system of embodiment 119, wherein the USP is 100% identical to any one of SEQ ID NOs: 1-16.

[0355] 124. The system of embodiment 119, wherein the USP comprises the sequence set forth in any one of SEQ ID NOs: 33-39.

[0356] 125. The system of any one of embodiments 119-124, wherein the target DNA sequence is located adjacent to a protospacer adjacent motif (PAM) that is recognized by the RGN.

[0357] 126. The system of any one of embodiments 119-125, wherein the target DNA molecule is within a cell.

[0358] 127. The system of embodiment 126, wherein the cell is a eukaryotic cell.

[0359] 128. The system of embodiment 127, wherein the eukaryotic cell is a plant cell.

[0360] 129. The system of embodiment 127, wherein the eukaryotic cell is a mammalian cell.

[0361] 130. The system of embodiment 127, wherein the eukaryotic cell is an insect cell.

[0362] 131. The system of embodiment 126, wherein the cell is a prokaryotic cell. 132. The system of any one of embodiments 119-131, wherein the RGN of the fusion protein is a Type II CRISPR-Cas polypeptide.

[0363] 133. The system of any one of embodiments 119-131, wherein the RGN of the fusion protein is a Type V CRISPR-Cas polypeptide.

[0364] 134. The system of any one of embodiments 119-131, wherein the RGN of the fusion protein is at least 80% identical to any one of SEQ ID NOs: 40 and 95-142.

[0365] 135. The system of any one of embodiments 119-131, wherein the RGN of the fusion protein is at least 85% identical to any one of SEQ ID NOs: 40 and 95-142.

[0366] 136. The system of any one of embodiments 119-131, wherein the RGN of the fusion protein is 90% identical to any one of SEQ ID NOs: 40 and 95-142.

[0367] 137. The system of any one of embodiments 119-131, wherein the RGN of the fusion protein is 95% identical to any one of SEQ ID NOs: 40 and 95-142.

[0368] 138. The system of any one of embodiments 119-131, wherein the RGN of the fusion protein is 100% identical to any one of SEQ ID NOs: 40 and 95-142.

[0369] 139. The system of any one of embodiments 119-138, wherein the RGN of the fusion protein is an RGN nickase.

[0370] 140. The system of any of embodiments 119-139, wherein the cytidine deaminase is at least 80% identical to any one of SEQ ID NOs: 47, 48 and 76-94.

[0371] 141. The system of any of embodiments 119-139, wherein the cytidine deaminase is at least 85% identical to any one of SEQ ID NOs: 47, 48 and 76-94.

[0372] 142. The system of any of embodiments 119-139, wherein the cytidine deaminase is at least 90% identical to any one of SEQ ID NOs: 47, 48 and 76-94.

[0373] 143. The system of any of embodiments 119-139, wherein the cytidine deaminase is at least 95% identical to any one of SEQ ID NOs: 47, 48 and 76-94.

[0374] 144. The system of any of embodiments 119-139, wherein the cytidine deaminase is 100% identical to any one of SEQ ID NOs: 47, 48 and 76-94.

[0375] 145. The system of any of embodiments 119-144, wherein the fusion protein comprises a RGN having at least 80% sequence identity to any one of SEQ ID NOs: 40, 41, 95 and 142, a cytidine deaminase having at least 80% sequence identity to any one of EQ ID NOs: 47, 48, and 76-94, and a USP having at least 80% sequence identity to any one of SEQ ID NOs: 1-16.

[0376] 146. The system of any of embodiments 119-144, wherein the fusion protein comprises a RGN having at least 85% sequence identity to any one of SEQ ID NOs: 40, 41, 95 and 142, a cytidine deaminase having at least 85% sequence identity to any one of EQ ID NOs: 47, 48, and 76-94, and a USP having at least 85% sequence identity to any one of SEQ ID NOs: 1-16.

[0377] 147. The system of any of embodiments 119-144, wherein the fusion protein comprises a RGN having at least 90% sequence identity to any one of SEQ ID NOs: 40, 41, 95 and 142, a cytidine deaminase having at least 90% sequence identity to any one of EQ ID NOs: 47, 48, and 76-94, and a USP having at least 90% sequence identity to any one of SEQ ID NOs: 1-16.

[0378] 148. The system of any of embodiments 119-144, wherein the fusion protein comprises a RGN having at least 95% sequence identity to any one of SEQ ID NOs: 40, 41, 95 and 142, a cytidine deaminase having at least 95% sequence identity to any one of EQ ID NOs: 47, 48, and 76-94, and a USP having at least 95% sequence identity to any one of SEQ ID NOs: 1-16.

[0379] 149. The system of any of embodiments 119-144, wherein the fusion protein comprises a RGN having 100% sequence identity to any one of SEQ ID NOs: 40, 41, 95 and 142, a cytidine deaminase having 100% sequence identity to any one of EQ ID NOs: 47, 48, and 76-94, and a USP having 100% sequence identity to any one of SEQ ID NOs: 1-16.

[0380] 150. The system of any of embodiments 119-149, wherein the fusion protein comprises one or more nuclear localization signals.

[0381] 151. The system of any of embodiments 119-150, wherein the fusion protein is codon optimized for expression in a eukaryotic cell.

[0382] 152. The system of any of embodiments 119-151, wherein nucleotide sequences encoding the one or more guide RNAs and the nucleotide sequence encoding a fusion protein are located on one vector.

[0383] 153. A method for modifying a target DNA molecule comprising a target DNA sequence, said method comprising delivering a system according to any one of embodiments 119-152 to said target DNA molecule or a cell comprising the target DNA molecule.

[0384] 154. The method of embodiment 153, wherein said modified target DNA molecule comprises a C>T mutation of at least one nucleotide within the target DNA molecule.

[0385] 155. The method of embodiment 153, wherein said modified target DNA molecule comprises a C>T mutation of at least one nucleotide within the target DNA sequence.

[0386] 156. A method for modifying a target DNA molecule comprising a target sequence comprising:
[0387] a) assembling an RGN-deaminase-USP ribonucleotide complex in vitro by combining:
   [0388] i) one or more guide RNAs capable of hybridizing to the target DNA sequence; and
   [0389] ii) a fusion protein comprising an RNA-guided nuclease polypeptide (RGN), a cytidine deaminase, and at least one uracil stabilizing polypeptide (USP), wherein the USP is at least 80% identical to any one of SEQ ID NOs: 1-16;
[0390] under conditions suitable for formation of the RGN-deaminase-USP ribonucleotide complex; and
[0391] b) contacting said target DNA molecule or a cell comprising said target DNA molecule with the in vitro-assembled RGN-deaminase-USP ribonucleotide complex;
[0392] wherein the one or more guide RNAs hybridize to the target DNA sequence, thereby directing said fusion protein to bind to said target DNA sequence and modification of the target DNA molecule occurs.

[0393] 157. The method of embodiment 156, wherein the USP is at least 85% identical to any one of SEQ ID NOs: 1-16.

[0394] 158. The method of embodiment 156, wherein the USP is at least 90% identical to any one of SEQ ID NOs: 1-16.

[0395] 159. The method of embodiment 156, wherein the USP is at least 95% identical to any one of SEQ ID NOs: 1-16.

[0396] 160. The method of embodiment 156, wherein the USP is 100% identical to any one of SEQ ID NOs: 1-16.

[0397] 161. The method of embodiment 156, wherein the USP comprises the sequence of any one of SEQ ID NOs: 33-39.

[0398] 162. The method of any one of embodiments 156-161, wherein said modified target DNA molecule comprises a C>T mutation of at least one nucleotide within the target DNA molecule.

[0399] 163. The method of any one of embodiments 156-161, wherein said modified target DNA molecule comprises a C>T mutation of at least one nucleotide within the target DNA sequence.

[0400] 164. The method of any one of embodiments 156-163, wherein the RGN of the fusion protein is a Type II CRISPR-Cas polypeptide.

[0401] 165. The method of any of embodiments 156-163, wherein the RGN of the fusion protein is a Type V CRISPR-Cas polypeptide.

[0402] 166. The method of any of embodiments 156-163, wherein the RGN of the fusion protein is at least 80% identical to any one of SEQ ID NOs: 40 and 95-142.

[0403] 167. The method of any of embodiments 156-163, wherein the RGN of the fusion protein is at least 85% identical to any one of SEQ ID NOs: 40 and 95-142.

[0404] 168. The method of any of embodiments 156-163, wherein the RGN of the fusion protein is at least 90% identical to any one of SEQ ID NOs: 40 and 95-142.

[0405] 169. The method of any of embodiments 156-163, wherein the RGN of the fusion protein is at least 95% identical to any one of SEQ ID NOs: 40 and 95-142.

[0406] 170. The method of any of embodiments 156-163, wherein the RGN of the fusion protein is 100% identical to any one of SEQ ID NOs: 40 and 95-142.

[0407] 171. The method of any of embodiments 156-170, wherein the RGN of the fusion protein is an RGN nickase.

[0408] 172. The method of any of embodiments 156-171, wherein the cytidine deaminase is at least 80% identical to any one of SEQ ID NOs: 47, 48 and 76-94.

[0409] 173. The method of any of embodiments 156-171, wherein the cytidine deaminase is at least 85% identical to any one of SEQ ID NOs: 47, 48 and 76-94.

[0410] 174. The method of any of embodiments 156-171, wherein the cytidine deaminase is at least 90% identical to any one of SEQ ID NOs: 47, 48 and 76-94.

[0411] 175. The method of any of embodiments 156-171, wherein the cytidine deaminase is at least 95% identical to any one of SEQ ID NOs: 47, 48 and 76-94.

[0412] 176. The method of any of embodiments 156-171, wherein the cytidine deaminase is 100% identical to any one of SEQ ID NOs: 47, 48 and 76-94.

[0413] 177. The method of any one of embodiments 156-176, wherein the fusion protein comprises an RGN having at least 80% sequence identity to any one of SEQ ID NOs: 40, 41, and 95-142, a cytidine deaminase having at least 80% sequence identity to any one of SEQ ID NOs: 47, 48, and 76-94, and a USP having at least 80% sequence identity to any one of SEQ ID NOs: 1-16.

[0414] 178. The method of any one of embodiments 156-176, wherein the fusion protein comprises an RGN having at least 85% sequence identity to any one of SEQ ID NOs: 40, 41, and 95-142, a cytidine deaminase having at least 85% sequence identity to any one of SEQ ID NOs: 47, 48, and 76-94, and a USP having at least 85% sequence identity to any one of SEQ ID NOs: 1-16.

[0415] 179. The method of any one of embodiments 156-176, wherein the fusion protein comprises an RGN having at least 90% sequence identity to any one of SEQ ID NOs: 40, 41, and 95-142, a cytidine deaminase having at least 90% sequence identity to any one of SEQ ID NOs: 47, 48, and 76-94, and a USP having at least 90% sequence identity to any one of SEQ ID NOs: 1-16.

[0416] 180. The method of any one of embodiments 156-176, wherein the fusion protein comprises an RGN having at least 95% sequence identity to any one of SEQ ID NOs: 40, 41, and 95-142, a cytidine deaminase having at least 95% sequence identity to any one of SEQ ID NOs: 47, 48, and 76-94, and a USP having at least 95% sequence identity to any one of SEQ ID NOs: 1-16.

[0417] 181. The method of any one of embodiments 156-176, wherein the fusion protein comprises an RGN having 100% sequence identity to any one of SEQ ID NOs: 40, 41, and 95-142, a cytidine deaminase having 100% sequence identity to any one of SEQ ID NOs: 47, 48, and 76-94, and a USP having 100% sequence identity to any one of SEQ ID NOs: 1-16.

[0418] 182. The method of any of embodiments 156-181, wherein the fusion protein comprises one or more nuclear localization signals.

[0419] 183. The method of any of embodiments 156-182, wherein the fusion protein is codon optimized for expression in a eukaryotic cell.

[0420] 184. The method of any of embodiments 156-183, wherein said target DNA sequence is located adjacent to a protospacer adjacent motif (PAM).

[0421] 185. The method of any of embodiments 156-184, wherein the target DNA molecule is within a cell.

[0422] 186. The method of embodiment 185, wherein the cell is a eukaryotic cell.

[0423] 187. The method of embodiment 186, wherein the eukaryotic cell is a plant cell.

[0424] 188. The method of embodiment 186, wherein the eukaryotic cell is a mammalian cell.

[0425] 189. The method of embodiment 186, wherein the eukaryotic cell is an insect cell.

[0426] 190. The method of embodiment 185, wherein the cell is a prokaryotic cell.

[0427] 191. The method of any one of embodiments 185-190, further comprising selecting a cell comprising said modified DNA molecule.

[0428] 192. A cell comprising a modified target DNA sequence according to the method of embodiment 191.

[0429] 193. The cell of embodiment 192, wherein the cell is a eukaryotic cell.

[0430] 194. The cell of embodiment 193, wherein the eukaryotic cell is a plant cell.

[0431] 195. A plant comprising the cell of embodiment 194.

[0432] 196. A seed comprising the cell of embodiment 194.

[0433] 197. The cell of embodiment 193, wherein the eukaryotic cell is a mammalian cell.

[0434] 198. The cell of embodiment 193, wherein the eukaryotic cell is an insect cell.

[0435] 199. The cell of embodiment 192, wherein the cell is a prokaryotic cell.

[0436] 200. A method for producing a genetically modified cell with a correction in a causal mutation for a genetically inherited disease, the method comprising introducing into the cell:
[0437] a) a fusion protein comprising an RNA-guided nuclease polypeptide (RGN), a cytidine deaminase, and at least one uracil stabilizing polypeptide (USP), wherein the USP is at least 80% identical to any one of SEQ ID NOs: 1-16, or a polynucleotide encoding said fusion protein, wherein said polynucleotide encoding the fusion protein is operably linked to a promoter to enable expression of the fusion protein in the cell; and
[0438] b) one or more guide RNAs (gRNA) capable of hybridizing to a target DNA sequence, or a polynucleotide encoding said gRNA, wherein said polynucleotide encoding the gRNA is operably linked to a promoter to enable expression of the gRNA in the cell;
   whereby the fusion protein and gRNA target to the genomic location of the causal mutation and modify the genomic sequence to remove the causal mutation.

[0439] 201. The method of embodiment 200, wherein the USP is at least 85% identical to any one of SEQ ID NOs: 1-16.

[0440] 202. The method of embodiment 200, wherein the USP is at least 90% identical to any one of SEQ ID NOs: 1-16.

[0441] 203. The method of embodiment 200, wherein the USP is at least 95% identical to any one of SEQ ID NOs: 1-16.

[0442] 204. The method of embodiment 200, wherein the USP is 100% identical to any one of SEQ ID NOs: 1-16.

[0443] 205. The method of embodiment 200, wherein said RGN of the fusion protein is a nickase.

[0444] 206. The method of embodiment 200 or 205, wherein the USP comprises the sequence of any one of SEQ ID NOs: 33-39.

[0445] 207. The method of any of embodiments 200-206, wherein the genome modification comprises introducing a C>T mutation of at least one nucleotide within the target DNA sequence.

[0446] 208. The method of any of embodiments 200-207, wherein the cell is an animal cell.

[0447] 209. The method of embodiment 208, wherein the animal cell is a mammalian cell.

[0448] 210. The method of embodiment 209, wherein the cell is derived from a dog, cat, mouse, rat, rabbit, horse, sheep, goat, cow, pig, or human.

[0449] 211. The method of any of embodiments 200-210, wherein the correction of the causal mutation comprises introducing a stop codon.

[0450] 212. A composition comprising:
[0451] a) a fusion protein comprising: (i) a DNA-binding polypeptide; and (ii) a deaminase; or a nucleic acid molecule encoding the fusion protein; and
[0452] b) a uracil stabilizing polypeptide (USP) having at least 80% sequence identity to any one of SEQ ID NOs: 1-16; or a nucleic acid molecule encoding the USP.

[0453] 213. The composition of embodiment 212, wherein the USP has at least 85% sequence identity to any one of SEQ ID NOs: 1-16.

[0454] 214. The composition of embodiment 212, wherein the USP has at least 90% sequence identity to any one of SEQ ID NOs: 1-16.

[0455] 215. The composition of embodiment 212, wherein the USP has at least 95% sequence identity to any one of SEQ ID NOs: 1-16.

[0456] 216. The composition of embodiment 212, wherein the USP has 100% sequence identity to any one of SEQ ID NOs: 1-16.

[0457] 217. The composition of embodiment 212, wherein the fusion protein further comprises a uracil stabilizing polypeptide (USP) having at least 80% sequence identity to any one of SEQ ID NOs: 1-16.

[0458] 218. The composition of embodiment 212, wherein the fusion protein further comprises a uracil stabilizing polypeptide (USP) having at least 85% sequence identity to any one of SEQ ID NOs: 1-16.

[0459] 219. The composition of embodiment 212, wherein the fusion protein further comprises a uracil stabilizing polypeptide (USP) having at least 90% sequence identity to any one of SEQ ID NOs: 1-16.

[0460] 220. The composition of embodiment 212, wherein the fusion protein further comprises a uracil stabilizing polypeptide (USP) having at least 95% sequence identity to any one of SEQ ID NOs: 1-16.

[0461] 221. The composition of embodiment 212, wherein the fusion protein further comprises a uracil stabilizing polypeptide (USP) having 100% sequence identity to any one of SEQ ID NOs: 1-16.

[0462] 222. The composition of embodiment 212, wherein the DNA-binding polypeptide is a meganuclease, zinc finger fusion protein, or a TALEN.

[0463] 223. The composition of embodiment 212, wherein the DNA-binding polypeptide is an RNA-guided, DNA-binding polypeptide.

[0464] 224. The composition of embodiment 223, wherein the RNA-guided, DNA-binding polypeptide is an RNA-guided nuclease polypeptide (RGN).

[0465] 225. The composition of embodiment 224, wherein the RGN is an RGN nickase.

[0466] 226. A vector comprising a nucleic acid molecule encoding a fusion protein and a nucleic acid molecule encoding a uracil stabilizing polypeptide (USP), wherein said fusion protein comprises a DNA-binding polypeptide and a deaminase, and wherein said USP has at least 80% sequence identity to any one of SEQ ID NOs: 1-16.

[0467] 227. The vector of embodiment 226, said USP has at least 85% sequence identity to any one of SEQ ID NOs: 1-16.

[0468] 228. The vector of embodiment 226, said USP has at least 90% sequence identity to any one of SEQ ID NOs: 1-16.

[0469] 229. The vector of embodiment 226, said USP has at least 95% sequence identity to any one of SEQ ID NOs: 1-16.

[0470] 230. The vector of embodiment 226, said USP has 100% sequence identity to any one of SEQ ID NOs: 1-16.

[0471] 231. The vector of embodiment 226, wherein the fusion protein further comprises a uracil stabilizing polypeptide (USP) having at least 80% sequence identity to any one of SEQ ID NOs: 1-16.

[0472] 232. The vector of embodiment 226, wherein the fusion protein further comprises a uracil stabilizing polypeptide (USP) having at least 85% sequence identity to any one of SEQ ID NOs: 1-16.

[0473] 233. The vector of embodiment 226, wherein the fusion protein further comprises a uracil stabilizing polypeptide (USP) having at least 90% sequence identity to any one of SEQ ID NOs: 1-16.

[0474] 234. The vector of embodiment 226, wherein the fusion protein further comprises a uracil stabilizing polypeptide (USP) having at least 95% sequence identity to any one of SEQ ID NOs: 1-16.

[0475] 235. The vector of embodiment 226, wherein the fusion protein further comprises a uracil stabilizing polypeptide (USP) having 100% sequence identity to any one of SEQ ID NOs: 1-16.

[0476] 236. The vector of embodiment 226, wherein the DNA-binding polypeptide is a meganuclease, zinc finger fusion protein, or a TALEN.

[0477] 237. The vector of embodiment 226, wherein the DNA-binding polypeptide is an RNA-guided, DNA-binding polypeptide.

[0478] 238. The vector of embodiment 237, wherein the RNA-guided, DNA-binding polypeptide is an RNA-guided nuclease polypeptide (RGN).

[0479] 239. The vector of embodiment 238, wherein the RGN is an RGN nickase.

[0480] 240. A cell comprising the vector of any one of embodiments 226-239.

[0481] 241. A cell comprising:
[0482] a) a fusion protein comprising: (i) a DNA-binding polypeptide; and (ii) a deaminase; or a nucleic acid molecule encoding the fusion protein; and
[0483] b) a uracil stabilizing polypeptide (USP) having at least 80% sequence identity to any one of SEQ ID NOs: 1-16; or a nucleic acid molecule encoding the USP.

[0484] 242. The cell of embodiment 241, wherein the USP has at least 85% sequence identity to any one of SEQ ID NOs: 1-16.

[0485] 243. The cell of embodiment 241, wherein the USP has at least 90% sequence identity to any one of SEQ ID NOs: 1-16.

[0486] 244. The cell of embodiment 241, wherein the USP has at least 95% sequence identity to any one of SEQ ID NOs: 1-16.

[0487] 245. The cell of embodiment 241, wherein the USP has 100% sequence identity to any one of SEQ ID NOs: 1-16.

[0488] 246. The cell of embodiment 241, wherein the fusion protein further comprises a uracil stabilizing polypeptide (USP) having at least 80% sequence identity to any one of SEQ ID NOs: 1-16.

[0489] 247. The cell of embodiment 241, wherein the fusion protein further comprises a uracil stabilizing polypeptide (USP) having at least 85% sequence identity to any one of SEQ ID NOs: 1-16.

[0490] 248. The cell of embodiment 241, wherein the fusion protein further comprises a uracil stabilizing polypeptide (USP) having at least 90% sequence identity to any one of SEQ ID NOs: 1-16.

[0491] 249. The cell of embodiment 241, wherein the fusion protein further comprises a uracil stabilizing polypeptide (USP) having at least 95% sequence identity to any one of SEQ ID NOs: 1-16.

[0492] 250. The cell of embodiment 241, wherein the fusion protein further comprises a uracil stabilizing polypeptide (USP) having 100% sequence identity to any one of SEQ ID NOs: 1-16.

[0493] 251. The cell of embodiment 241, wherein the DNA-binding polypeptide is a meganuclease, zinc finger fusion protein, or a TALEN.

[0494] 252. The cell of embodiment 241, wherein the DNA-binding polypeptide is an RNA-guided, DNA-binding polypeptide.

[0495] 253. The cell of embodiment 252, wherein the RNA-guided, DNA-binding polypeptide is an RNA-guided nuclease polypeptide (RGN).

[0496] 254. The cell of embodiment 253, wherein the RGN is an RGN nickase.

[0497] The following examples are offered by way of illustration and not by way of limitation.

### EXPERIMENTAL

### Example 1: Uracil Stabilizing Polypeptides

[0498] Amino acid sequences for the Uracil Stabilizing Polypeptides (USPs) of the invention are provided as SEQ ID NOs: 1-16, as shown in Table 1. All USPs disclosed are from Staphylococcus spp and range from 112 to 116 amino acids in length. The polypeptides of the USPs described herein possess 16.4% to 20.7% negative charges, with an expected pI of 3.86-4.55, except for APG05963 which has an expected pI of 5.26.

[0499] USPs APG06351, APG03399, APG04638, APG09242, APG02463, APG04080, APG01791, APG04001, and APG03327 share a unique consensus C-terminus sequence of “KEGGNDHE” (SEQ ID NO: 33). USPs APG05198 and APG05756 share a unique C-terminus sequence of “EKENYNNE” (SEQ ID NO: 34). APG05963 possesses a unique C-terminus sequence of “EKEKHKNE” (SEQ ID NO: 35); APG06702 possesses a unique C-terminus sequence of “DKGDDNHD” (SEQ ID NO: 36); APG05316 possesses a unique C-terminus sequence of “QKGGQ” (SEQ ID NO: 37); APG09230 possesses a unique C-terminus sequence of “KGENKYE” (SEQ ID NO: 38); and APG04100 possesses a unique C-terminus sequence of “KQGENNHE” (SEQ ID NO: 39).

TABLE 1
Uracil stabilizing polypeptides

| | SEQ ID |
|---|---|
| USP ID | NO |
| APG03399 | 1 |
| APG06702 | 2 |
| APG05198 | 3 |
| APG04638 | 4 |
| APG06351 | 5 |
| APG05963 | 6 |
| APG09230 | 7 |
| APG04100 | 8 |
| APG04001 | 9 |
| APG02463 | 10 |
| APG09242 | 11 |
| APG04080 | 12 |
| APG05316 | 13 |
| APG03327 | 14 |
| APG01791 | 15 |
| APG05756 | 16 |

### Example 2: USP Fusion Proteins Exhibit Increased Base Editing Activity in Mammalian Cells

[0500] Residues predicted to deactivate the RuvC domain of the RGN APG07433.1 (SEQ ID NO: 40; PCT publication WO 2019/236566, incorporated by reference herein) were identified and the RGN was modified to a nickase variant (nAPG07433.1; SEQ ID NO: 41). Fusion proteins comprising a cytidine deaminase, namely APG09980 (SEQ ID NO: 47; see PCT/US2019/068079, incorporated by reference herein) or APG07386CTD (SEQ ID NO: 48; see PCT/US2019/068079), were produced. Of the USPs in Table 1, three were selected for assaying for activity in fusion proteins, namely APG03399, APG06702, and APG05198. Deaminase, USP, and nRGN nucleotide sequences codon optimized for expression were synthesized as fusion proteins with an N-terminal nuclear localization tag and cloned into the pTwist CMV (Twist Biosciences) expression plasmid. A fusion protein lacking a USP of the invention comprises, starting at the amino terminus, the SV40 NLS (SEQ ID NO: 42) operably linked at the C-terminal end to 3X FLAG Tag (SEQ ID NO: 43), operably linked at the C-terminal end to a deaminase, operably linked at the C-terminal end to a peptide linker (SEQ ID NO: 44), operably linked at the C-terminal end to the nRGN (for example, nAPG07433.1, which is SEQ ID NO: 41), finally operably linked at the C-terminal end to the nucleoplasmin NLS (SEQ ID NO: 45). A fusion protein comprising a USP of the invention comprises, starting at the amino terminus, the SV40 NLS (SEQ ID NO: 42) operably linked at the C-terminal end to 3X FLAG Tag (SEQ ID NO: 43), operably linked at the C-terminal end to a deaminase, operably linked at the C-terminal end to a peptide linker (SEQ ID NO: 44), operably linked at the C-terminal end to the nRGN (for example, SEQ ID NO: 41), operably linked at the C-terminal end to a second linker sequence (SEQ ID NO: 46), operably linked at the C-terminal end to a USP of the invention, finally operably linked at the C-terminal end to the nucleoplasmin NLS (SEQ ID NO: 45). Table 2 shows the fusion proteins produced and tested for activity. All fusion proteins comprise at least one NLS and a 3X FLAG Tag, as described above.

TABLE 2
Fusion proteins assayed for C > T Editing

| | SEQ ID |
|---|---|
| Fusion protein | NO |
| APG09980-nAPG07433.1 | 49 |
| APG09980-nAPG07433.1-APG03399 | 50 |
| APG09980-nAPG07433.1-APG06702 | 51 |
| APG09980-nAPG07433.1-APG05198 | 52 |
| APG07386-CTD-nAPG07433.1 | 53 |
| APG07386-CTD-nAPG07433.1-APG03399 | 54 |
| APG07386-CTD-nAPG07433.1-APG06702 | 55 |
| APG07386-CTD-nAPG07433.1-APG05198 | 56 |

[0501] Expression plasmids comprising an expression cassette encoding for a sgRNA were also produced. Human genomic target sequences and the sgRNA sequences for guiding the fusion proteins to the genomic targets are indicated in Table 3. The genomic loci for each target sequence is also indicated.

TABLE 3
guide RNA sequences

| | Target | sgRNA | Genomic |
|---|---|---|---|
| sgRNA ID | sequence | sequence | locus |
| SGN000143 | 57 | 63 | 69 |
| SGN000169 | 58 | 64 | 70 |
| SGN000173 | 59 | 65 | 71 |
| SGN000929 | 60 | 66 | 72 |
| SGN000930 | 61 | 67 | 73 |
| SGN001101 | 62 | 68 | 74 |

[0502] 500 ng of plasmid comprising an expression cassette comprising a coding sequence for a fusion protein shown in Table 2 and 500 ng of plasmid comprising an expression cassette encoding for an sgRNA shown in Table 3 were co-transfected into HEK293FT cells at 75-90% confluency in 24-well plates using

[0503] Lipofectamine 2000 reagent (Life Technologies). Cells were then incubated at 37° C. for 72 h. Following incubation, genomic DNA was then extracted using NucleoSpin 96 Tissue (Macherey-Nagel) following the manufacturer's protocol. The genomic region flanking the targeted genomic site was PCR amplified and products were purified using ZR-96 DNA Clean and Concentrator (Zymo Research) following the manufacturer's protocol. The purified PCR products were then sent for Next Generation Sequencing on

[0504] Illumina MiSeq (2×250). Results were analyzed for indel formation or specific cytosine mutation out to +30 nucleotides, where the last nucleotide at the 3′ end of the target sequence described in Table 3 is +1, and wherein the +30 nucleotide is 29 nucleotides upstream or 5′ from the +1 nucleotide in the target sequence set forth in SEQ ID NOs: 57-62 (the target sequences of SEQ ID NOs: 57-62 are indicated as lower-case text within the genomic locus sequences set forth in SEQ ID NOs: 69-74, respectively).

[0505] Tables 4 through 15 show cytidine base editing for each combination of a fusion protein from Table 2 and a guide RNA from Table 3. Fusion proteins are identified by their SEQ ID NO. The numbering of cytidines (Cs) in Tables 4-15 are as in the preceding paragraph wherein the last nucleotide at the 3′ end of the target sequence is +1 and the numbering proceeds in the 3′ to 5′ direction in the target sequence and corresponding genomic locus sequence. Interestingly, when comparing the activity of a deaminase-nRGN fusion protein with that of a corresponding deaminase-nRGN plus a USP, using the same guide RNA, the conversion of a cytidine to the desired thymidine is higher, with less conversion to an adenosine or guanosine.

TABLE 4
C > N Editing Rate using deaminase
APG09980 and guide SGN000143

| Fusion Protein | | | | | | | |
|---|---|---|---|---|---|---|---|
| (SEQ ID NO) | | C10 | C15 | C20 | C21 | C22 | C25 |
| 49 | A | 2.8 | 0.1 | 0 | 0.2 | 0.6 | 0.1 |
| | G | 1.1 | 0.1 | 0.1 | 0.1 | 0.2 | 0 |
| | T | 11 | 0.4 | 0.2 | 0.3 | 2 | 0.7 |
| 50 | A | 0 | 0 | 0 | 0 | 0 | 0 |
| | G | 0 | 0 | 0 | 0 | 0 | 0 |
| | T | 23.5 | 1.4 | 1.7 | 2 | 4.6 | 0.7 |
| 51 | A | 0.1 | 0 | 0 | 0 | 0 | 0 |
| | G | 0 | 0 | 0 | 0 | 0 | 0 |
| | T | 16.3 | 1.2 | 1.5 | 1.6 | 3.1 | 0.6 |
| 52 | A | 0.2 | 0 | 0 | 0 | 0 | 0 |
| | G | 0 | 0 | 0 | 0 | 0 | 0 |
| | T | 21.4 | 1.6 | 1.1 | 1.4 | 2.5 | 0.7 |

[0506] The results of Table 4 show that the rate of C>T editing at position C10 increased in samples with a USP.

TABLE 5
C > N Editing Rate using deaminase
APG07386 and guide SGN000143

| Fusion Protein | | | | | | | |
|---|---|---|---|---|---|---|---|
| (SEQ ID NO.) | | C10 | C15 | C20 | C21 | C22 | C25 |
| 53 | A | 0.1 | 0.4 | 0 | 0.5 | 1 | 0 |
| | G | 0 | 0.8 | 0 | 0 | 0.1 | 0 |
| | T | 0.5 | 4 | 0.3 | 0.7 | 3.8 | 0 |
| 54 | A | 0 | 0 | 0 | 0 | 0.1 | 0 |
| | G | 0 | 0 | 0 | 0 | 0 | 0 |
| | T | 1 | 4.5 | 1 | 1.7 | 3.1 | 0.1 |
| 55 | A | 0 | 0.1 | 0 | 0 | 0.1 | 0 |
| | G | 0 | 0 | 0 | 0 | 0 | 0 |
| | T | 1.6 | 9.7 | 2.5 | 3.2 | 5.8 | 0.2 |
| 56 | A | 0 | 0.1 | 0 | 0 | 0 | 0 |
| | G | 0 | 0 | 0 | 0 | 0 | 0 |
| | T | 1.9 | 10.2 | 2.6 | 3.1 | 7 | 0.2 |

[0507] The results of Table 5 show that the rate of C>T editing at position C15 increased in samples with a USP.

TABLE 6
C > N Editing Rate using deaminase
APG09980 and guide SGN000169

| Fusion Protein | | | | | | | |
|---|---|---|---|---|---|---|---|
| (SEQ ID NO.) | | C9 | C13 | C15 | C18 | C20 | C23 |
| 49 | A | 0.5 | 0.8 | 3.6 | 0.3 | 1.3 | 1.3 |
| | G | 1.5 | 1.8 | 8.3 | 0 | 0.2 | 0.1 |
| | T | 1.5 | 23.9 | 16.3 | 0.3 | 8.6 | 4.9 |
| 50 | A | 0 | 0 | 0.6 | 0 | 0.1 | 0.2 |
| | G | 0.2 | 0 | 2.5 | 0 | 0 | 0 |
| | T | 7 | 38.1 | 35.8 | 0.5 | 16.6 | 13.4 |
| 51 | A | 0.2 | 0.3 | 1.3 | 0.2 | 0.3 | 0.4 |
| | G | 0.6 | 0.6 | 2.1 | 0.1 | 0.1 | 0 |
| | T | 9.2 | 42.4 | 40.8 | 0.8 | 20.4 | 16.6 |
| 52 | A | 0.8 | 1 | 2.4 | 0.7 | 0.6 | 1.5 |
| | G | 0.5 | 1.7 | 3.7 | 0.5 | 0.5 | 0.2 |
| | T | 8.5 | 37.8 | 35.7 | 1.2 | 17.1 | 14.9 |

[0508] The results of Table 6 show that the rate of C>T formation at positions C13 and C15 increased with the addition of a USP.

TABLE 7
C > N Editing Rate using deaminase
APG07386 and guide SGN000169

| Fusion Protein | | | | | | | |
|---|---|---|---|---|---|---|---|
| (SEQ ID NO.) | | C9 | C13 | C15 | C18 | C20 | C23 |
| 53 | A | 0.8 | 0.7 | 2 | 0 | 0.5 | 0.3 |
| | G | 5.4 | 0.8 | 10.2 | 0.1 | 0.1 | 0 |
| | T | 3.5 | 5.1 | 11.2 | 0.3 | 2.6 | 2.4 |
| 54 | A | 0.1 | 0.5 | 0.8 | 0 | 0.3 | 0.2 |
| | G | 0.7 | 0.2 | 2.5 | 0.2 | 0.1 | 0 |
| | T | 8.5 | 15.9 | 24.8 | 1.5 | 6.4 | 7.1 |
| 55 | A | 0.3 | 0.5 | 1.3 | 0.4 | 0.2 | 0.4 |
| | G | 2 | 0.5 | 3.5 | 0.1 | 0.2 | 0.1 |
| | T | 14.3 | 22.7 | 37.1 | 2 | 9.2 | 7.9 |
| 56 | A | 0.1 | 0.1 | 0.7 | 0 | 0.2 | 0 |
| | G | 0.7 | 0 | 2.9 | 0 | 0 | 0 |
| | T | 14.7 | 24 | 36.4 | 1.3 | 8.4 | 8.9 |

[0509] The results of Table 7 show that the rate of C>T formation at positions C13 and C15 increased with the addition of a USP.

TABLE 8
C > N Editing Rate using deaminase
APG09980 and guide SGN000930

| Fusion Protein | | | | |
|---|---|---|---|---|
| (SEQ ID NO.) | | C17 | C19 | C22 |
| 49 | A | 0.7 | 0.4 | 1.4 |
| | G | 34.5 | 0.4 | 0 |
| | T | 2.6 | 2.4 | 2.2 |
| 50 | A | 0.3 | 0.1 | 0.3 |
| | G | 8.6 | 0.3 | 0 |
| | T | 33 | 2.8 | 3.2 |
| 51 | A | 0.2 | 0.1 | 0.2 |
| | G | 5.1 | 0.1 | 0.1 |
| | T | 35.7 | 3.6 | 3.3 |
| 52 | A | 0.4 | 0.3 | 0.9 |
| | G | 11.2 | 0 | 0 |
| | T | 23.7 | 2.5 | 2.5 |

[0510] The results of Table 8 show that the rate of C>G editing at position C17 decreased in all samples with a USP in favor of C>T changes.

TABLE 9
C > N Editing Rate using deaminase
APG07386 and guide SGN000930

| Fusion Protein | | | | |
|---|---|---|---|---|
| (SEQ ID NO.) | | C17 | C19 | C22 |
| 53 | A | 0.2 | 0 | 0.4 |
| | G | 14.7 | 0 | 0.4 |
| | T | 1.1 | 0.2 | 2.2 |
| 54 | A | 0 | 0 | 0 |
| | G | 1.4 | 0 | 0 |
| | T | 9.1 | 0.4 | 3.7 |
| 55 | A | 0.4 | 0.1 | 0.3 |
| | G | 2.6 | 0.2 | 0.2 |
| | T | 11.8 | 0.9 | 4.5 |
| 56 | A | 0.1 | 0.2 | 0 |
| | G | 2.7 | 0 | 0.1 |
| | T | 17.4 | 0.8 | 6.7 |

[0511] The results of Table 9 show that the C>G editing at position C17 decreased in all samples with a USP in favor of C>T changes.

TABLE 10
C > N Editing Rate using deaminase APG09980 and guide SGN00173

| Fusion Protein | | | | | | | | | | | |
|---|---|---|---|---|---|---|---|---|---|---|---|
| (SEQ ID NO.) | | C1 | C2 | C3 | C4 | C7 | C8 | C10 | C11 | C17 | C20 |
| 49 | A | 0 | 0 | 0.1 | 0.3 | 3.1 | 6.9 | 0.3 | 0 | 3.4 | 0.1 |
| | G | 0 | 0.1 | 0 | 0.2 | 0.3 | 1 | 0.1 | 0.4 | 3.4 | 0.1 |
| | T | 0.1 | 0 | 0 | 2.5 | 11.1 | 12.3 | 1.7 | 0.2 | 12.1 | 1.7 |
| 50 | A | 0 | 0.1 | 0 | 0.1 | 0.9 | 2.9 | 0 | 0.4 | 1.5 | 0 |
| | G | 0.1 | 0.1 | 0 | 0 | 0.5 | 0.8 | 0.4 | 0.3 | 1.9 | 0.2 |
| | T | 0.1 | 0.1 | 0.3 | 14 | 39 | 39.3 | 28.7 | 13 | 31.1 | 12 |
| 51 | A | 0 | 0 | 0 | 0 | 1.2 | 1.6 | 0 | 0 | 0.9 | 0 |
| | G | 0 | 0 | 0 | 0 | 0 | 1.4 | 0.1 | 0 | 2.2 | 0.1 |
| | T | 0 | 0 | 0.3 | 10.4 | 33.5 | 33.4 | 23.8 | 10.9 | 26.8 | 10.3 |
| 52 | A | 0 | 0 | 0 | 0 | 1.8 | 1.2 | 0.3 | 0 | 1.5 | 0 |
| | G | 0 | 0 | 0 | 0 | 0 | 0.8 | 0 | 0.5 | 2.7 | 0 |
| | T | 0 | 0 | 0.6 | 10.5 | 33.1 | 36.8 | 26.7 | 13.2 | 28.6 | 9.6 |

[0512] The results of Table 10 show that the rate of C>T formation at positions C4, C7, C8, C10, C11, C17 and C20 increased with the addition of a USP.

TABLE 11
C > N Editing Rate using deaminase APG07386 and guide SGN00173

| Fusion Protein | | | | | | | | | | | |
|---|---|---|---|---|---|---|---|---|---|---|---|
| (SEQ ID NO.) | | C1 | C2 | C3 | C4 | C7 | C8 | C10 | C11 | C17 | C20 |
| 53 | A | 0 | 0 | 0 | 0.1 | 0.4 | 1.1 | 0 | 2.5 | 2.8 | 0 |
| | G | 0 | 0 | 0 | 0 | 0.1 | 0.3 | 0 | 0.5 | 2 | 0 |
| | T | 0 | 0 | 0 | 0.5 | 1.4 | 2.5 | 0 | 7 | 11.3 | 0.7 |
| 54 | A | 0 | 0 | 0 | 0 | 0 | 0.1 | 0 | 0.7 | 0.8 | 0 |
| | G | 0 | 0 | 0 | 0 | 0 | 0 | 0 | 0 | 0.6 | 0 |
| | T | 0 | 0 | 0 | 1.6 | 6.1 | 8.6 | 2.2 | 13.3 | 23 | 1.8 |
| 55 | A | 0 | 0 | 0 | 0 | 0.2 | 0 | 0 | 1 | 0.9 | 0 |
| | G | 0 | 0 | 0 | 0 | 0 | 0.3 | 0.1 | 0.1 | 0.5 | 0 |
| | T | 0 | 0 | 0.2 | 2.2 | 9.1 | 11.2 | 3.2 | 13 | 21.3 | 2 |
| 56 | A | 0 | 0 | 0 | 0 | 0 | 0 | 0 | 0.9 | 0.8 | 0 |
| | G | 0 | 0 | 0 | 0 | 0 | 0.1 | 0 | 0.2 | 0.5 | 0 |
| | T | 0 | 0 | 0.1 | 2.7 | 12.3 | 15 | 4.3 | 18.3 | 27.1 | 1.9 |

[0513] The results of Table 11 show that the rate of C>T formation at positions C7, C8, C11 and C17 increased with the addition of a USP.

TABLE 12
C > N Editing Rate using deaminase
APG09980 and guide SGN000929

| Fusion Protein | | | | | |
|---|---|---|---|---|---|
| (SEQ ID NO.) | | C6 | C9 | C13 | C23 |
| 49 | A | 0.2 | 1.1 | 0.2 | 5.2 |
| | G | 0.2 | 1.5 | 1.4 | 20.1 |
| | T | 1.2 | 5.2 | 1 | 7.4 |
| 50 | A | 0 | 0.1 | 0 | 1.3 |
| | G | 0 | 0.1 | 0 | 3.3 |
| | T | 2.2 | 9.4 | 3.2 | 30.8 |
| 51 | A | 0 | 0.2 | 0 | 0.8 |
| | G | 0 | 0.1 | 0 | 1.6 |
| | T | 1.5 | 9.2 | 3.5 | 34 |
| 52 | A | 0.5 | 0.6 | 0 | 1.8 |
| | G | 0.1 | 0.5 | 0 | 6.5 |
| | T | 1.6 | 8.6 | 2.7 | 22.3 |

[0514] The results of Table 12 show that the rate of C>T formation at position C23 increased with the addition of a USP.

TABLE 13
C > N Editing Rate using deaminase
APG07386 and guide SGN000929

| Fusion Protein | | | | | |
|---|---|---|---|---|---|
| (SEQ ID NO.) | | C6 | C9 | C13 | C23 |
| 53 | A | 1.5 | 0 | 0 | 1.5 |
| | G | 0.6 | 0 | 0.1 | 5.2 |
| | T | 5 | 0.3 | 0.1 | 2.1 |
| 54 | A | 0 | 0 | 0 | 0.1 |
| | G | 0 | 0 | 0 | 0.1 |
| | T | 4.2 | 0.3 | 0 | 4.6 |
| 55 | A | 0.2 | 0 | 0.1 | 0 |
| | G | 0 | 0 | 0 | 1.4 |
| | T | 10.4 | 0.9 | 0.3 | 8.2 |
| 56 | A | 0.1 | 0 | 0 | 0.2 |
| | G | 0.2 | 0 | 0 | 0.5 |
| | T | 10.8 | 0.6 | 0.4 | 8.5 |

[0515] The results of Table 13 show that the rate of C>T formation at positions C6 and C23 increased with the addition of a USP.

TABLE 14
C > N Editing Rate using deaminase
APG09980 and guide SGN001101

| Fusion Protein | | | | | |
|---|---|---|---|---|---|
| (SEQ ID NO.) | | C2 | C6 | C7 | C18 |
| 49 | A | 0.1 | 1.8 | 0.4 | 3.3 |
| | G | 0 | 2.8 | 0.1 | 18.5 |
| | T | 0.1 | 6.5 | 1.8 | 5.3 |
| 50 | A | 0.2 | 0.3 | 0.2 | 0.6 |
| | G | 0.1 | 0.1 | 0.2 | 2.1 |
| | T | 0.1 | 9.1 | 0.7 | 25.4 |
| 51 | A | 0.2 | 0.1 | 0.1 | 0.3 |
| | G | 0.1 | 0.1 | 0 | 2.4 |
| | T | 0.1 | 7.9 | 0.7 | 21.8 |
| 52 | A | 0.2 | 0.9 | 0.2 | 1.2 |
| | G | 0 | 0.8 | 0 | 4.8 |
| | T | 0.2 | 7.7 | 1.3 | 19.4 |

[0516] The results of Table 14 show that the rate of C>T formation at position C18 increased with the addition of a USP.

TABLE 15
C > N Editing Rate using deaminase
APG07386 and guide SGN001101

| Fusion Protein | | | | | |
|---|---|---|---|---|---|
| (SEQ ID NO.) | | C2 | C6 | C7 | C18 |
| 53 | A | 0.1 | 0 | 4 | 2.2 |
| | G | 0 | 0 | 2.1 | 11 |
| | T | 0 | 0 | 10.4 | 3.9 |
| 54 | A | 0.1 | 0 | 0.1 | 0 |
| | G | 0 | 0 | 0.1 | 0.6 |
| | T | 0 | 1.7 | 8.5 | 6.7 |
| 55 | A | 0.2 | 0.1 | 0.6 | 0.3 |
| | G | 0 | 0 | 0.5 | 1.4 |
| | T | 0 | 1.7 | 10.7 | 9.2 |
| 56 | A | 0.1 | 0 | 0.3 | 0.2 |
| | G | 0 | 0 | 0.4 | 1.4 |
| | T | 0 | 1.9 | 12.1 | 9.8 |

[0517] The results of Table 15 show that the rate of C>T formation at position C18 increased with the addition of a USP. The rate of C>G conversion was decreased at position C18 with the addition of a USP.

[0518] Tables 16 and 17 show the rate of indel formation for each fusion protein/guide combination tested. The fusion protein is indicated by SEQ ID NO. The data indicates that the fusion proteins comprising a USP described herein decreased the rate of indel formation at all target genomic locations tested.

TABLE 16
Insertion and Deletion Rate with APG09980 and USPs

| | SEQ ID | SEQ ID | SEQ ID | SEQ ID |
|---|---|---|---|---|
| sgRNA ID | NO: 49 | NO: 50 | NO: 51 | NO: 52 |
| SGN000143 | 2.78 | 0 | 0 | 0.62 |
| SGN000169 | 18.02 | 1.62 | 3.89 | 9.1 |
| SGN000173 | 27.46 | 7.86 | 7.17 | 7.48 |
| SGN000929 | 3.49 | 0.2 | 0.65 | 2.36 |
| SGN000930 | 6.03 | 0.81 | 0.65 | 1.65 |
| SGN001101 | 2.5 | 1.66 | 0.92 | 1.86 |

TABLE 17
Insertion and Deletion Rate with APG07386-CTD and USPs

| | SEQ ID | SEQ ID | SEQ ID | SEQ ID |
|---|---|---|---|---|
| sgRNA ID | NO: 53 | NO: 54 | NO: 55 | NO: 56 |
| SGN000143 | 0.13 | 0.05 | 0 | 0.06 |
| SGN000169 | 5.6 | 1.38 | 3.11 | 0.32 |
| SGN000173 | 13.8 | 0.99 | 3.49 | 2.57 |
| SGN000929 | 0.5 | 0 | 0.3 | 0.16 |
| SGN000930 | 1.7 | 0 | 0.23 | 0.31 |
| SGN001101 | 1.78 | 0 | 0.48 | 0.39 |

### Example 3: Testing Different Delivery Formats

[0519] To determine if the base editors are capable of delivery in different formats, mRNA delivery was tested with primary T-cells. Purified CD3+ T-cells or PBMCs were thawed, activated using CD3/CD28 beads (ThermoFisher) for 3 days, then nucleofected using the Lonza 4D-Nucleofector X unit and Nucleocuvette strips. The P3 Primary Cell kit was used for both mRNA and RNP delivery. Cells were transfected using the EO-115 and EH-115 programs for mRNA and RNP delivery respectively. Cells were cultured in CTS OpTimizer T cell expansion medium (ThermoFisher) containing IL-2, IL-7, and IL-15 (Miltenyi Biotec) for 4 days post nucleofection before being harvested using a Nucleospin Tissue genomic DNA isolation kit (Machery Nagel).

[0520] Amplicons surrounding the editing sites were generated by PCR and subjected to NGS sequencing using the Illumina Nexterra platform using 2×250 bp paired end sequencing. The estimated base editing rate was determined by calculating the overall substitution rate for each sample. The average and number of samples for each guide tested are shown in Tables 18 and 19 below.

[0521] APG09980-nAPG07433.1-APG03399 and APG05840-nAPG07433.1-APG03399 when delivered by mRNA show high rates of base editing as several targets. There are very low rates of indel formation despite the high substitution rate, due to the incorporation of USP2 in the base editing construct.

TABLE 18
Average base editing rate for APG09980-nAPG07433.1-APG03399

| | Gene | | Average % | Average % | |
|---|---|---|---|---|---|
| Fusion Construct | Name | SGN | Substitutions | Indels | N |
| APG09980- | Gene 1 | SGN000754 | 23.32917436 | 1.128931 | 6 |
| nAPG07433.1-APG03399 | | | | | |
| APG09980- | Gene 1 | SGN000755 | 59.37254849 | 7.1037823 | 4 |
| nAPG07433.1-APG03399 | | | | | |
| APG09980- | Gene 2 | SGN001061 | 13.60100568 | 0.4214674 | 3 |
| nAPG07433.1-APG03399 | | | | | |
| APG09980- | Gene 2 | SGN001062 | 26.9304354 | 4.3225871 | 4 |
| nAPG07433.1-APG03399 | | | | | |
| APG09980- | Gene 2 | SGN001063 | 75.27761104 | 0.8163273 | 4 |
| nAPG07433.1-APG03399 | | | | | |
| APG09980- | Gene 2 | SGN001064 | 72.94658862 | 1.0468487 | 3 |
| nAPG07433.1-APG03399 | | | | | |

TABLE 19
Average base editing rate for APG05840-nAPG07433.1-APG03399

| | Gene | | Average % | Average % | |
|---|---|---|---|---|---|
| Fusion Construct | Name | SGN | Substitutions | Indels | N |
| APG05840- | Gene 1 | SGN000754 | 57.7775198 | 5.14624384 | 4 |
| nAPG07433.1-APG03399 | | | | | |
| APG05840- | Gene 1 | SGN000755 | 68.352455 | 4.98538891 | 3 |
| nAPG07433.1-APG03399 | | | | | |
| APG05840- | Gene 2 | SGN001061 | 14.6830209 | 0 | 2 |
| nAPG07433.1-APG03399 | | | | | |
| APG05840- | Gene 2 | SGN001062 | 39.7312597 | 2.9887885 | 4 |
| nAPG07433.1-APG03399 | | | | | |
| APG05840- | Gene 2 | SGN001063 | 70.4564399 | 0.25727852 | 4 |
| nAPG07433.1-APG03399 | | | | | |
| APG05840- | Gene 2 | SGN001064 | 53.2112842 | 1.98008536 | 3 |
| nAPG07433.1-APG03399 | | | | | |

The application's sequence listing, which the Patent Office published only in electronic form, follows.

SEQUENCE LISTING (142 sequences)

SEQ ID NO: 1 - protein, 116 aa, Staphylococcus sp.
  MISC_FEATURE: APG03399
MKTTTQELKQYITRLFQLSNNETWECEALEEAAENILPERFINNSLLAHLTLNTYTYYNDELHELSIYPFLMYANDQLISIGYLDHFDMDFLYLTDTKNTIIDERHLLKQGENNHE

SEQ ID NO: 2 - protein, 116 aa, Staphylococcus sp.
  MISC_FEATURE: APG06702
MTIENELKEYITDLFELPKDEQWLCEAVDEVADNILPDEYVTLGPLRNKTLETFTYYSNTLHERNIYPFILYYQNRLIAIGYIDENYEMDFMYLHNTAITLIDQRYLIDKGDDNHD

SEQ ID NO: 3 - protein, 116 aa, Staphylococcus sp.
  MISC_FEATURE: APG05198
MTLEKQLKEYITNLFNLPKDEKWECESIEEVADNILPDQYIRLGPLTNKILHTYTYYSDTLHERHIYPFILYYQKQLIAIGYIDETNDMDFLYLHNTVMPLLDQRHLLEKENYNNE

SEQ ID NO: 4 - protein, 116 aa, Staphylococcus sp.
  MISC_FEATURE: APG04638
MKTTTQELKQYITRLFQLSNNETWECEALEEAAENILPERFINDSPLAHLTLETYTYYNNELHDLSIYPFLMYANNQLISVGYLNHFDMDFLYLTDTKNTIIDERHLLREGGTHHE

SEQ ID NO: 5 - protein, 116 aa, Staphylococcus sp.
  MISC_FEATURE: APG06351
MKTITQELKQYITHLFQLSNNEAWECEALEEAAENILPERFINDSPLVHLTLETYTYYNDELHELSIYPFLMYANNQLISVGYLDHFDMDFLYLTDTQNIIIDERHLLKQGGQDHE

SEQ ID NO: 6 - protein, 116 aa, Staphylococcus sp.
  MISC_FEATURE: APG05963
MTLEQQLKHYITNLFKLPKDEKWECESIEEVADNILPDQYVRLGPLTNKILHTYTYYSDTLHERHIYPFILYYQKQLIAIGYIDETNDMDFLYLHNTVMPLLDQRHLLEKEKHKNE

SEQ ID NO: 7 - protein, 115 aa, Staphylococcus sp.
  MISC_FEATURE: APG09230
MKTQINELKSYITNLFQLTSQENWECEALNESADNILPERFLNDSPLSNRILETYTYYNNELHELSIYPFLMYYQNQLISIGYLDHYDMDFLYLNDTQTTIIDERHLLKGENKYE

SEQ ID NO: 8 - protein, 116 aa, Staphylococcus sp.
  MISC_FEATURE: APG04100
MKTTTQELKQYITRLFQLSNEESWECEVLDEVAENILPPRFVDGSPLTHLTLETYTYYNNELHDLSIYPFLMYANNQLISVGYLDHFDMDFLYLTDTKNTIIDERHLLKQGENNHE

SEQ ID NO: 9 - protein, 116 aa, Staphylococcus sp.
  MISC_FEATURE: APG04001
MKTTTQELKQYITRLFQLSNNETWECEALEEAAENILPTRFVDHTPLAHLTLDTYTYYNDELHELSIYPFLMYANNQLISIGYLDHFDMDFLYLTDTKNIIIDERHLLREGGNDRE

SEQ ID NO: 10 - protein, 116 aa, Staphylococcus sp.
  MISC_FEATURE: APG02463
MQTTTQELKQYITRLFQLSNNETWECEALEEAAENILPERFINGSPLAHLTLETYTYYNDELHELSIYPFLMYANNQLISIGYLDHFDMDFLYLTDTKNTIIDERHLLKEGGNNHE

SEQ ID NO: 11 - protein, 116 aa, Staphylococcus sp.
  MISC_FEATURE: APG09242
MKTTTQELKQYITRLFQLSNNETWECEALEDTAENILPECFINDTPLAHLTLETYTYYNDELHELSIYPFLMYANNQLISVGYLDHFDMDFLYLTDTKNTIIDERHLLKEGGNDHE

SEQ ID NO: 12 - protein, 116 aa, Staphylococcus sp.
  MISC_FEATURE: APG04080
MKTTTQELKQYITRLFQLSNNETWECEALEEAAANILPERFINNSPLAHLTLETYTYYNDELHELSIYPFLMYANNQLISVGYLDHFDMDFLYLTDTKNTIIDERHLLKEGGNNHE

SEQ ID NO: 13 - protein, 112 aa, Staphylococcus sp.
  MISC_FEATURE: APG05316
MTLSKQLKTYITERFKLNYQETWACETIDAVAEDVLPEKYIKNSPLEHKILNTFTYYNDELHEISIYPFLCYLDKELVAIGYLDNFDLDFIFLNDTHQVIIDERYLLQKGGQ

SEQ ID NO: 14 - protein, 113 aa, Staphylococcus sp.
  MISC_FEATURE: APG03327
MKTTTQELKQYITRLFQLSNNETWECEALEDAAENILPTRFVDHTPLAHLTLETYTYYNDELHELSIYPFLIYANNQLISIGYLDHFDMDFLYLTDTKNTIIDERHLLQKGRE

SEQ ID NO: 15 - protein, 116 aa, Staphylococcus sp.
  MISC_FEATURE: APG01791
MKTTTQELKQYITRLFQLSNNETWECEALEEAAENILPTRFVGHTPLAHLTLETYTYYNDELHELSIYPFLMYANDQLISIGYLDHFDMDFLYLTDTKNTLIDERHLLKQGGNDHE

SEQ ID NO: 16 - protein, 116 aa, Staphylococcus sp.
  MISC_FEATURE: APG05756
MTLEQQLKHYITNLFSLPQDEKWECESIEEVADNILPDQYVRLGPLTNKILHTYTYYSDKLHERHIYPFILYYQKQLIAIGYIDEINDMDFLYLHNTVMPLLDQRHLLEKENYNNE

SEQ ID NO: 17 - DNA, 348 bp, Artificial Sequence
  APG03399 mammalian codon optimized sequence
atgaagaccaccacccaggagctgaagcagtacatcaccaggctgttccagctgagcaacaacgagacctgggagtgcgaggccctggaggaggccgccgagaacatcctgcccgagaggttcatcaacaacagcctgctggcccacctgaccctgaacacctacacctactacaacgacgagctgcacgagctgagcatctaccccttcctgatgtacgccaacgaccagctgatcagcatcggctacctggaccacttcgacatggacttcctgtacctgaccgacaccaagaacaccatcatcgacgagaggcacctgctgaagcagggcgagaacaaccacgag

SEQ ID NO: 18 - DNA, 348 bp, Artificial Sequence
  APG06702 mammalian codon optimized sequence
atgaccatcgagaacgagctgaaggagtacatcaccgacctgttcgagctgcccaaggacgagcagtggctgtgcgaggccgtggacgaggtggccgacaacatcctgcccgacgagtacgtgaccctgggccccctgaggaacaagaccctggagaccttcacctactacagcaacaccctgcacgagaggaacatctaccccttcatcctgtactaccagaacaggctgatcgccatcggctacatcgacgagaactacgagatggacttcatgtacctgcacaacaccgccatcaccctgatcgaccagaggtacctgatcgacaagggcgacgacaaccacgac

SEQ ID NO: 19 - DNA, 348 bp, Artificial Sequence
  APG05198 mammalian codon optimized sequence
atgaccctggagaagcagctgaaggagtacatcaccaacctgttcaacctgcccaaggacgagaagtgggagtgcgagagcatcgaggaggtggccgacaacatcctgcccgaccagtacatcaggctgggccccctgaccaacaagatcctgcacacctacacctactacagcgacaccctgcacgagaggcacatctaccccttcatcctgtactaccagaagcagctgatcgccatcggctacatcgacgagaccaacgacatggacttcctgtacctgcacaacaccgtgatgcccctgctggaccagaggcacctgctggagaaggagaactacaacaacgag

SEQ ID NO: 20 - DNA, 348 bp, Artificial Sequence
  APG04638 mammalian codon optimized sequence
atgaagaccaccacccaggagctgaagcagtacatcaccaggctgttccagctgagcaacaacgagacctgggagtgcgaggccctggaggaggccgccgagaacatcctgcccgagaggttcatcaacgacagccccctggcccacctgaccctggagacctacacctactacaacaacgagctgcacgacctgagcatctaccccttcctgatgtacgccaacaaccagctgatcagcgtgggctacctgaaccacttcgacatggacttcctgtacctgaccgacaccaagaacaccatcatcgacgagaggcacctgctgagggagggcggcacccaccacgag

SEQ ID NO: 21 - DNA, 348 bp, Artificial Sequence
  APG06351 mammalian codon optimized sequence
atgaagaccatcacccaggagctgaagcagtacatcacccacctgttccagctgagcaacaacgaggcctgggagtgcgaggccctggaggaggccgccgagaacatcctgcccgagaggttcatcaacgacagccccctggtgcacctgaccctggagacctacacctactacaacgacgagctgcacgagctgagcatctaccccttcctgatgtacgccaacaaccagctgatcagcgtgggctacctggaccacttcgacatggacttcctgtacctgaccgacacccagaacatcatcatcgacgagaggcacctgctgaagcagggcggccaggaccacgag

SEQ ID NO: 22 - DNA, 348 bp, Artificial Sequence
  APG05963 mammalian codon optimized sequence
atgaccctggagcagcagctgaagcactacatcaccaacctgttcaagctgcccaaggacgagaagtgggagtgcgagagcatcgaggaggtggccgacaacatcctgcccgaccagtacgtgaggctgggccccctgaccaacaagatcctgcacacctacacctactacagcgacaccctgcacgagaggcacatctaccccttcatcctgtactaccagaagcagctgatcgccatcggctacatcgacgagaccaacgacatggacttcctgtacctgcacaacaccgtgatgcccctgctggaccagaggcacctgctggagaaggagaagcacaagaacgag

SEQ ID NO: 23 - DNA, 345 bp, Artificial Sequence
  APG09230 mammalian codon optimized sequence
atgaagacccagatcaacgagctgaagagctacatcaccaacctgttccagctgaccagccaggagaactgggagtgcgaggccctgaacgagagcgccgacaacatcctgcccgagaggttcctgaacgacagccccctgagcaacaggatcctggagacctacacctactacaacaacgagctgcacgagctgagcatctaccccttcctgatgtactaccagaaccagctgatcagcatcggctacctggaccactacgacatggacttcctgtacctgaacgacacccagaccaccatcatcgacgagaggcacctgctgaagggcgagaacaagtacgag

SEQ ID NO: 24 - DNA, 348 bp, Artificial Sequence
  APG04100 mammalian codon optimized sequence
atgaagaccaccacccaggagctgaagcagtacatcaccaggctgttccagctgagcaacgaggagagctgggagtgcgaggtgctggacgaggtggccgagaacatcctgccccccaggttcgtggacggcagccccctgacccacctgaccctggagacctacacctactacaacaacgagctgcacgacctgagcatctaccccttcctgatgtacgccaacaaccagctgatcagcgtgggctacctggaccacttcgacatggacttcctgtacctgaccgacaccaagaacaccatcatcgacgagaggcacctgctgaagcagggcgagaacaaccacgag

SEQ ID NO: 25 - DNA, 348 bp, Artificial Sequence
  APG04001 mammalian codon optimized sequence
atgaagaccaccacccaggagctgaagcagtacatcaccaggctgttccagctgagcaacaacgagacctgggagtgcgaggccctggaggaggccgccgagaacatcctgcccaccaggttcgtggaccacacccccctggcccacctgaccctggacacctacacctactacaacgacgagctgcacgagctgagcatctaccccttcctgatgtacgccaacaaccagctgatcagcatcggctacctggaccacttcgacatggacttcctgtacctgaccgacaccaagaacatcatcatcgacgagaggcacctgctgagggagggcggcaacgacagggag

SEQ ID NO: 26 - DNA, 348 bp, Artificial Sequence
  APG02463 mammalian codon optimized sequence
atgcagaccaccacccaggagctgaagcagtacatcaccaggctgttccagctgagcaacaacgagacctgggagtgcgaggccctggaggaggccgccgagaacatcctgcccgagaggttcatcaacggcagccccctggcccacctgaccctggagacctacacctactacaacgacgagctgcacgagctgagcatctaccccttcctgatgtacgccaacaaccagctgatcagcatcggctacctggaccacttcgacatggacttcctgtacctgaccgacaccaagaacaccatcatcgacgagaggcacctgctgaaggagggcggcaacaaccacgag

SEQ ID NO: 27 - DNA, 348 bp, Artificial Sequence
  APG09242 mammalian codon optimized sequence
atgaagaccaccacccaggagctgaagcagtacatcaccaggctgttccagctgagcaacaacgagacctgggagtgcgaggccctggaggacaccgccgagaacatcctgcccgagtgcttcatcaacgacacccccctggcccacctgaccctggagacctacacctactacaacgacgagctgcacgagctgagcatctaccccttcctgatgtacgccaacaaccagctgatcagcgtgggctacctggaccacttcgacatggacttcctgtacctgaccgacaccaagaacaccatcatcgacgagaggcacctgctgaaggagggcggcaacgaccacgag

SEQ ID NO: 28 - DNA, 348 bp, Artificial Sequence
  APG04080 mammalian codon optimized sequence
atgaagaccaccacccaggagctgaagcagtacatcaccaggctgttccagctgagcaacaacgagacctgggagtgcgaggccctggaggaggccgccgccaacatcctgcccgagaggttcatcaacaacagccccctggcccacctgaccctggagacctacacctactacaacgacgagctgcacgagctgagcatctaccccttcctgatgtacgccaacaaccagctgatcagcgtgggctacctggaccacttcgacatggacttcctgtacctgaccgacaccaagaacaccatcatcgacgagaggcacctgctgaaggagggcggcaacaaccacgag

SEQ ID NO: 29 - DNA, 336 bp, Artificial Sequence
  APG05316 mammalian codon optimized sequence
atgaccctgagcaagcagctgaagacctacatcaccgagaggttcaagctgaactaccaggagacctgggcctgcgagaccatcgacgccgtggccgaggacgtgctgcccgagaagtacatcaagaacagccccctggagcacaagatcctgaacaccttcacctactacaacgacgagctgcacgagatcagcatctaccccttcctgtgctacctggacaaggagctggtggccatcggctacctggacaacttcgacctggacttcatcttcctgaacgacacccaccaggtgatcatcgacgagaggtacctgctgcagaagggcggccag

SEQ ID NO: 30 - DNA, 339 bp, Artificial Sequence
  APG03327 mammalian codon optimized sequence
atgaagaccaccacccaggagctgaagcagtacatcaccaggctgttccagctgagcaacaacgagacctgggagtgcgaggccctggaggacgccgccgagaacatcctgcccaccaggttcgtggaccacacccccctggcccacctgaccctggagacctacacctactacaacgacgagctgcacgagctgagcatctaccccttcctgatctacgccaacaaccagctgatcagcatcggctacctggaccacttcgacatggacttcctgtacctgaccgacaccaagaacaccatcatcgacgagaggcacctgctgcagaagggcagggag

SEQ ID NO: 31 - DNA, 348 bp, Artificial Sequence
  APG01791 mammalian codon optimized sequence
atgaagaccaccacccaggagctgaagcagtacatcaccaggctgttccagctgagcaacaacgagacctgggagtgcgaggccctggaggaggccgccgagaacatcctgcccaccaggttcgtgggccacacccccctggcccacctgaccctggagacctacacctactacaacgacgagctgcacgagctgagcatctaccccttcctgatgtacgccaacgaccagctgatcagcatcggctacctggaccacttcgacatggacttcctgtacctgaccgacaccaagaacaccctgatcgacgagaggcacctgctgaagcagggcggcaacgaccacgag

SEQ ID NO: 32 - DNA, 348 bp, Artificial Sequence
  APG05756 mammalian codon optimized sequence
atgaccctggagcagcagctgaagcactacatcaccaacctgttcagcctgccccaggacgagaagtgggagtgcgagagcatcgaggaggtggccgacaacatcctgcccgaccagtacgtgaggctgggccccctgaccaacaagatcctgcacacctacacctactacagcgacaagctgcacgagaggcacatctaccccttcatcctgtactaccagaagcagctgatcgccatcggctacatcgacgagatcaacgacatggacttcctgtacctgcacaacaccgtgatgcccctgctggaccagaggcacctgctggagaaggagaactacaacaacgag

SEQ ID NO: 33 - protein, 8 aa, Artificial Sequence
  Shared consensus C-terminus sequence
KEGGNDHE

SEQ ID NO: 34 - protein, 8 aa, Artificial Sequence
  APG05756 and APG05198 unique C-term seq
EKENYNNE

SEQ ID NO: 35 - protein, 8 aa, Artificial Sequence
  APG05963 unique C-term seq
EKEKHKNE

SEQ ID NO: 36 - protein, 8 aa, Artificial Sequence
  APG06702 unique C-terminal seq
DKGDDNHD

SEQ ID NO: 37 - protein, 5 aa, Artificial Sequence
  APG05316 unique C-terminal seq
QKGGQ

SEQ ID NO: 38 - protein, 7 aa, Artificial Sequence
  APG09230 unique C-term seq
KGENKYE

SEQ ID NO: 39 - protein, 8 aa, Artificial Sequence
  APG04100 unique C-term seq
KQGENNHE

SEQ ID NO: 40 - protein, 1071 aa, Artificial Sequence
  RGN APG07433.1
MRELDYRIGLDIGTNSIGWGVIELSWNKDRERYEKVRIVDQGVRMFDRAEMPKTGASLAEPRRIARSSRRRLNRKSQRKKNIRNLLVQHGVITQEELDSLYPLSKKSMDIWGIRLDGLDRLLNHFEWARLLIHLAQRRGFKSNRKSELKDTETGKVLSSIQLNEKRLSLYRTVGEMWMKDPDFSKYDRKRNSPNEYVFSVSRAELEKEIVTLFAAQRRFQSPYASKDLQETYLQIWTHQLPFASGNAILNKVGYCSLLKGKERRIPKATYTFQYFSALDQVNRTRLGPDFQPFTKEQREIILNNMFQRTDYYKKKTIPEVTYYDIRKWLELDETIQFKGLNYDPNEELKKIEKKPFINLKAFYEINKVVANYSERTNETFSTLDYDGIGYALTVYKTDKDIRSYLKSSHNLPKRCYDDQLIEELLSLSYTKFGHLSLKAINHVLSIMQKGNTYKEAVDQLGYDTSGLKKEKRSKFLPPISDEITNPIVKRALTQARKVVNAIIRRHGSPHSVHIELARELSKNHDERTKIVSAQDENYKKNKGAISILSEHGILNPTGYDIVRYKLWKEQGERCAYSLKEIPADTFFNELKKERNGAPILEVDHILPYSQSFIDSYHNKVLVYSDENRKKGNRIPYTYFLETNKDWEAFERYVRSNKFFSKKKREYLLKRAYLPRESELIKERHLNDTRYASTFLKNFIEQNLQFKEAEDNPRKRRVQTVNGVITAHFRKRWGLEKDRQETYLHHAMDAIIVACTDHHMVTRVTEYYQIKESNKSVKKPYFPMPWEGFRDELLSHLASQPIAKKISEELKAGYQSLDYIFVSRMPKRSITGAAHKQTIMRKGGIDKKGKTIIIERLHLKDIKFDENGDFKMVGKEQDMATYEAIKQRYLEHGKNSKKAFETPLYKPSKKGTGNLIKRVKVEGQAKSFVREVNGGVAQNGDLVRVDLFEKDDKYYMVPIYVPDTVCSELPKKVVASSKGYEQWLTLDNSFTFKFSLYPYDLVRLVKGDEDRFLYFGTLDIDSDRLNFKDVNKPSKKNEYRYSLKTIEDLEKYEVGVLGDLRLVRKETRRNFH

SEQ ID NO: 41 - protein, 1071 aa, Artificial Sequence
  nRGN APG07433.1
MRELDYRIGLAIGTNSIGWGVIELSWNKDRERYEKVRIVDQGVRMFDRAEMPKTGASLAEPRRIARSSRRRLNRKSQRKKNIRNLLVQHGVITQEELDSLYPLSKKSMDIWGIRLDGLDRLLNHFEWARLLIHLAQRRGFKSNRKSELKDTETGKVLSSIQLNEKRLSLYRTVGEMWMKDPDFSKYDRKRNSPNEYVFSVSRAELEKEIVTLFAAQRRFQSPYASKDLQETYLQIWTHQLPFASGNAILNKVGYCSLLKGKERRIPKATYTFQYFSALDQVNRTRLGPDFQPFTKEQREIILNNMFQRTDYYKKKTIPEVTYYDIRKWLELDETIQFKGLNYDPNEELKKIEKKPFINLKAFYEINKVVANYSERTNETFSTLDYDGIGYALTVYKTDKDIRSYLKSSHNLPKRCYDDQLIEELLSLSYTKFGHLSLKAINHVLSIMQKGNTYKEAVDQLGYDTSGLKKEKRSKFLPPISDEITNPIVKRALTQARKVVNAIIRRHGSPHSVHIELARELSKNHDERTKIVSAQDENYKKNKGAISILSEHGILNPTGYDIVRYKLWKEQGERCAYSLKEIPADTFFNELKKERNGAPILEVDHILPYSQSFIDSYHNKVLVYSDENRKKGNRIPYTYFLETNKDWEAFERYVRSNKFFSKKKREYLLKRAYLPRESELIKERHLNDTRYASTFLKNFIEQNLQFKEAEDNPRKRRVQTVNGVITAHFRKRWGLEKDRQETYLHHAMDAIIVACTDHHMVTRVTEYYQIKESNKSVKKPYFPMPWEGFRDELLSHLASQPIAKKISEELKAGYQSLDYIFVSRMPKRSITGAAHKQTIMRKGGIDKKGKTIIIERLHLKDIKFDENGDFKMVGKEQDMATYEAIKQRYLEHGKNSKKAFETPLYKPSKKGTGNLIKRVKVEGQAKSFVREVNGGVAQNGDLVRVDLFEKDDKYYMVPIYVPDTVCSELPKKVVASSKGYEQWLTLDNSFTFKFSLYPYDLVRLVKGDEDRFLYFGTLDIDSDRLNFKDVNKPSKKNEYRYSLKTIEDLEKYEVGVLGDLRLVRKETRRNFH

SEQ ID NO: 42 - protein, 7 aa, Artificial Sequence
  SV40 NLS
PKKKRKV

SEQ ID NO: 43 - protein, 22 aa, Artificial Sequence
  3X FLAG tag
DYKDHDGDYKDHDIDYKDDDDK

SEQ ID NO: 44 - protein, 32 aa, Artificial Sequence
  Peptide linker 1
SGGSSGGSSGSETPGTSESATPESSGGSSGGS

SEQ ID NO: 45 - protein, 16 aa, Artificial Sequence
  Nucleoplasmin NLS
KRPAATKKAGQAKKKK

SEQ ID NO: 46 - protein, 10 aa, Artificial Sequence
  Peptide linker 2
SGGSGGSGGS

SEQ ID NO: 47 - protein, 230 aa, Staphylococcus sp.
  MISC_FEATURE: APG09980_cytidine deaminase
MAAGPAPEARSLMDEQTFLDNFNNLKYPRKTYLCYEVELLVGENHIPLDDYKGFVHNEGFDMGLERCHAELIFLERMASWNLDTELRYRITVFISWSPCPECADELVKFLRENRHVNLRIFAARIYDWYQGYEAGLRALKAAGAEVAMMTLHEFEYCWNNFVDHQQDEDTPFPPWDNLVARSEELSQRLEGILQPSVLVFCWPSQVSVTAAHSDIMSQASRAWEKRRDPP

SEQ ID NO: 48 - protein, 182 aa, Artificial Sequence
  APG07386-CTD_cytidine deaminase
MEATYPHIFYFHFKNLRKAYGRNETWLCFTMEIIKQHSTVFWETGVFRNQVYPESLCHAERCFLSWFCEDILSPNTDYRVTWYTSWSPCLDCAGEVAEFLARHSNVKLAIFAARLYYFWDPHYQQGLRSLSEKGASVEIMGYKDFKYCWENFVYNGDEPFKPWKGLKYNFLFLDSKLQEILQ

SEQ ID NO: 49 - DNA, 4158 bp, Artificial Sequence
  APG09980_nAPG07433.1
atggcccctaagaagaaaagaaaggtggactacaaggaccacgacggcgactacaaagatcacgatatcgactacaaggacgacgatgataagatggccgctggacctgcccctgaagccagaagcctgatggacgagcagaccttcctggataacttcaacaacctgaagtaccccagaaagacctacctgtgctacgaggtggaactgctggtgggcgagaaccacatccctctggacgactacaagggcttcgtgcacaacgagggctttgatatgggcctggaacggtgccacgccgagctgatcttcctggaaagaatggcctcttggaatctggacaccgagctgagataccggatcaccgtgttcatctcttggtccccatgtcctgagtgcgccgacgagctggttaagttcctgcgggaaaatagacacgtgaacctgagaatctttgccgctagaatctacgactggtatcagggctacgaggccggcctgcgggccctgaaagccgccggagccgaagtggccatgatgaccctgcacgagttcgagtactgctggaacaacttcgtggaccaccagcaggacgaagatacacctttccccccctgggacaacctggtcgccagatccgaggaactgagccagagactggaaggcatcctgcagcctagcgtgctggtgttctgctggcctagccaagtgtccgtgaccgccgcccacagcgacatcatgagccaggcctctagagcctgggagaagcggcgggacccccccagcggcggatctagcggcggctctagcggcagtgaaacccctggtacaagcgagtctgccacacctgagagcagcggcggaagcagcggaggaagcatgagagagctggactacagaattggcctggccatcggcaccaacagcatcggatggggcgtgatcgagctgtcctggaacaaagaccgggagagatacgagaaggtcagaatcgtggatcaaggcgtgagaatgttcgacagagccgagatgcccaagacaggcgccagcttagctgaacccagaagaatcgccagatccagcagacggagactgaatcgcaagtcccagagaaagaaaaacatccggaacctgctggtgcaacacggcgtgatcacacaggaggaactggatagcctgtaccccctgagcaaaaagagcatggacatctggggcattcggctcgacggcctggacagactcctcaatcatttcgagtgggccagactgctgatccacctggctcagagacggggctttaagtccaacagaaagagtgaactgaaagatacagagacaggcaaggtgctgagcagcatccaactgaacgagaaacggctgagcttgtatagaaccgtgggcgagatgtggatgaaggaccccgacttctctaaatacgataggaagagaaatagccccaacgaatacgtgttcagcgtgtctagagccgagctggaaaaggaaatcgtgaccctgttcgccgcccagcggagattccagagcccttacgccagcaaagatctgcaggagacatatctgcagatctggacccaccaactgcctttcgccagcggcaatgccatcctgaacaaggtcggatactgctccctgttgaaaggcaaagaaagaaggattcccaaggctacatacaccttccaatacttctctgctctggaccaggtgaatcggaccagactgggacctgatttccagcccttcaccaaggagcaacgggaaattatcttgaacaacatgttccagaggacagattactacaagaagaaaaccatccccgaggtgacctactatgacatacggaagtggctggaattggacgagacaattcagttcaagggcctgaactacgaccctaacgaggaactgaagaagatcgagaagaagccttttatcaatctgaaggccttctacgagatcaacaaggtggtggccaactacagcgaaagaaccaacgagaccttctccaccctggactacgacggcatcggctacgccctgaccgtgtacaaaaccgacaaggatatccgcagctacctgaagagcagtcacaacctacctaagagatgctacgacgaccaactgatcgaggaactgctgagcctgagctacacaaagttcggccacctgtccctgaaagccatcaaccacgtgctgtctatcatgcagaagggcaatacctacaaggaagccgtggaccaactgggctacgacaccagcggccttaagaaggagaagaggtccaagttcctgccacctatttctgatgaaatcacgaatccaatcgtgaaaagggccctgacccaggccagaaaagtggtgaacgccataattagaagacacggatctcctcactccgtgcacatcgagctggccagagagctgagcaagaaccacgacgagcggacaaagatcgtcagcgcccaggatgaaaactacaagaaaaacaagggcgctatcagcatcctgtctgagcacggcatcctgaaccctacaggctacgacatcgtgagatacaaactgtggaaggagcagggcgaacggtgcgcctacagcctgaaggaaatccctgccgatacatttttcaacgagctgaagaaggaacgcaacggcgcccctatccttgaagtggaccacatcctgccctacagccagtccttcatcgactcctaccacaacaaggtcctggtgtacagcgacgaaaaccggaaaaagggcaacagaatcccttatacctacttcctggaaaccaacaaggattgggaggcctttgagcggtacgtgcggagcaacaaattcttctccaagaaaaagcgagagtaccttctgaagcgggcttatctgcctagagaatctgagctgatcaaagaacgccacctgaacgacaccagatacgcctctaccttcctgaagaacttcatcgagcagaacctgcagttcaaggaagccgaggacaaccccagaaaaagacgggtgcaaaccgtgaacggcgttatcaccgcccacttcagaaagcggtggggcctggagaaggaccggcaggagacatacctccatcacgctatggacgccatcatcgtggcttgtacagaccaccacatggtcaccagagtgaccgagtactatcagatcaaggaaagcaacaagagcgtgaagaagccctattttcctatgccttgggaaggcttccgggacgagctgctgagccacttggcttctcagcctatcgccaagaaaatcagcgaggaactgaaggccggctaccagagcctggactacatcttcgtgtccagaatgcctaagagaagcattacaggcgctgctcataagcagaccatcatgcggaagggaggaattgacaagaagggcaaaacaatcatcatcgaacggctgcacctgaaggatatcaagttcgacgagaacggagatttcaagatggtgggcaaggaacaggacatggccacatacgaagctattaaacagagatacctggagcacggcaagaatagcaagaaggccttcgagacccctctgtacaagcccagcaaaaagggcacaggtaacctgatcaagcgggtgaaggtggaaggacaggccaagagctttgtgagggaagtgaacggcggagtggcccaaaatggcgatctggttagagttgatttgtttgagaaggatgataagtactacatggtccccatctacgtgccagacaccgtgtgtagcgagctgcccaaaaaggtggtcgccagctctaagggctatgagcagtggctgacactggataacagcttcacctttaagttcagcctgtacccttatgatctggtgcggctggtcaagggagatgaggatcggttcctgtactttggcaccctggacatcgacagcgacagacttaacttcaaggacgtgaacaagccaagcaagaagaacgagtaccggtacagcttgaaaaccatcgaggacttggagaagtacgaggtgggcgtgctgggcgatctaagactggtccggaaggaaactcgaagaaacttccacagcggcggaagcaaaagacctgccgctacaaagaaggccggccaggccaagaaaaagaagtaatga

SEQ ID NO: 50 - DNA, 4530 bp, Artificial Sequence
  APG09980_nAPG07433.1_APG03399
atggcccctaagaagaaaagaaaggtggactacaaggaccacgacggcgactacaaagatcacgatatcgactacaaggacgacgatgataagatggccgctggacctgcccctgaagccagaagcctgatggacgagcagaccttcctggataacttcaacaacctgaagtaccccagaaagacctacctgtgctacgaggtggaactgctggtgggcgagaaccacatccctctggacgactacaagggcttcgtgcacaacgagggctttgatatgggcctggaacggtgccacgccgagctgatcttcctggaaagaatggcctcttggaatctggacaccgagctgagataccggatcaccgtgttcatctcttggtccccatgtcctgagtgcgccgacgagctggttaagttcctgcgggaaaatagacacgtgaacctgagaatctttgccgctagaatctacgactggtatcagggctacgaggccggcctgcgggccctgaaagccgccggagccgaagtggccatgatgaccctgcacgagttcgagtactgctggaacaacttcgtggaccaccagcaggacgaagatacacctttccccccctgggacaacctggtcgccagatccgaggaactgagccagagactggaaggcatcctgcagcctagcgtgctggtgttctgctggcctagccaagtgtccgtgaccgccgcccacagcgacatcatgagccaggcctctagagcctgggagaagcggcgggacccccccagcggcggatctagcggcggctctagcggcagtgaaacccctggtacaagcgagtctgccacacctgagagcagcggcggaagcagcggaggaagcatgagagagctggactacagaattggcctggccatcggcaccaacagcatcggatggggcgtgatcgagctgtcctggaacaaagaccgggagagatacgagaaggtcagaatcgtggatcaaggcgtgagaatgttcgacagagccgagatgcccaagacaggcgccagcttagctgaacccagaagaatcgccagatccagcagacggagactgaatcgcaagtcccagagaaagaaaaacatccggaacctgctggtgcaacacggcgtgatcacacaggaggaactggatagcctgtaccccctgagcaaaaagagcatggacatctggggcattcggctcgacggcctggacagactcctcaatcatttcgagtgggccagactgctgatccacctggctcagagacggggctttaagtccaacagaaagagtgaactgaaagatacagagacaggcaaggtgctgagcagcatccaactgaacgagaaacggctgagcttgtatagaaccgtgggcgagatgtggatgaaggaccccgacttctctaaatacgataggaagagaaatagccccaacgaatacgtgttcagcgtgtctagagccgagctggaaaaggaaatcgtgaccctgttcgccgcccagcggagattccagagcccttacgccagcaaagatctgcaggagacatatctgcagatctggacccaccaactgcctttcgccagcggcaatgccatcctgaacaaggtcggatactgctccctgttgaaaggcaaagaaagaaggattcccaaggctacatacaccttccaatacttctctgctctggaccaggtgaatcggaccagactgggacctgatttccagcccttcaccaaggagcaacgggaaattatcttgaacaacatgttccagaggacagattactacaagaagaaaaccatccccgaggtgacctactatgacatacggaagtggctggaattggacgagacaattcagttcaagggcctgaactacgaccctaacgaggaactgaagaagatcgagaagaagccttttatcaatctgaaggccttctacgagatcaacaaggtggtggccaactacagcgaaagaaccaacgagaccttctccaccctggactacgacggcatcggctacgccctgaccgtgtacaaaaccgacaaggatatccgcagctacctgaagagcagtcacaacctacctaagagatgctacgacgaccaactgatcgaggaactgctgagcctgagctacacaaagttcggccacctgtccctgaaagccatcaaccacgtgctgtctatcatgcagaagggcaatacctacaaggaagccgtggaccaactgggctacgacaccagcggccttaagaaggagaagaggtccaagttcctgccacctatttctgatgaaatcacgaatccaatcgtgaaaagggccctgacccaggccagaaaagtggtgaacgccataattagaagacacggatctcctcactccgtgcacatcgagctggccagagagctgagcaagaaccacgacgagcggacaaagatcgtcagcgcccaggatgaaaactacaagaaaaacaagggcgctatcagcatcctgtctgagcacggcatcctgaaccctacaggctacgacatcgtgagatacaaactgtggaaggagcagggcgaacggtgcgcctacagcctgaaggaaatccctgccgatacatttttcaacgagctgaagaaggaacgcaacggcgcccctatccttgaagtggaccacatcctgccctacagccagtccttcatcgactcctaccacaacaaggtcctggtgtacagcgacgaaaaccggaaaaagggcaacagaatcccttatacctacttcctggaaaccaacaaggattgggaggcctttgagcggtacgtgcggagcaacaaattcttctccaagaaaaagcgagagtaccttctgaagcgggcttatctgcctagagaatctgagctgatcaaagaacgccacctgaacgacaccagatacgcctctaccttcctgaagaacttcatcgagcagaacctgcagttcaaggaagccgaggacaaccccagaaaaagacgggtgcaaaccgtgaacggcgttatcaccgcccacttcagaaagcggtggggcctggagaaggaccggcaggagacatacctccatcacgctatggacgccatcatcgtggcttgtacagaccaccacatggtcaccagagtgaccgagtactatcagatcaaggaaagcaacaagagcgtgaagaagccctattttcctatgccttgggaaggcttccgggacgagctgctgagccacttggcttctcagcctatcgccaagaaaatcagcgaggaactgaaggccggctaccagagcctggactacatcttcgtgtccagaatgcctaagagaagcattacaggcgctgctcataagcagaccatcatgcggaagggaggaattgacaagaagggcaaaacaatcatcatcgaacggctgcacctgaaggatatcaagttcgacgagaacggagatttcaagatggtgggcaaggaacaggacatggccacatacgaagctattaaacagagatacctggagcacggcaagaatagcaagaaggccttcgagacccctctgtacaagcccagcaaaaagggcacaggtaacctgatcaagcgggtgaaggtggaaggacaggccaagagctttgtgagggaagtgaacggcggagtggcccaaaatggcgatctggttagagttgatttgtttgagaaggatgataagtactacatggtccccatctacgtgccagacaccgtgtgtagcgagctgcccaaaaaggtggtcgccagctctaagggctatgagcagtggctgacactggataacagcttcacctttaagttcagcctgtacccttatgatctggtgcggctggtcaagggagatgaggatcggttcctgtactttggcaccctggacatcgacagcgacagacttaacttcaaggacgtgaacaagccaagcaagaagaacgagtaccggtacagcttgaaaaccatcgaggacttggagaagtacgaggtgggcgtgctgggcgatctaagactggtccggaaggaaactcgaagaaacttccacagtggaggcagcggcggatctggaggcagcatgaaaaccaccacacaggagctgaagcagtacatcaccagactgttccaactgagcaacaacgagacatgggagtgcgaggccctggaagaggccgccgagaacatcctgcctgagagattcatcaacaacagcctgctggcccacctgacactgaacacctacacctactacaacgatgagctgcacgagctttctatctaccccttcctgatgtacgccaacgaccaactgatcagcatcggctacctggaccacttcgacatggacttcctttatctgaccgacaccaagaacaccatcatcgacgagcggcacctgctgaaacagggcgagaacaaccacgagagcggcggaagcaaaagacctgccgctacaaagaaggccggccaggccaagaaaaagaag

SEQ ID NO: 51 - DNA, 4530 bp, Artificial Sequence
  APG09980_nAPG07433.1_APG06702
atggcccctaagaagaaaagaaaggtggactacaaggaccacgacggcgactacaaagatcacgatatcgactacaaggacgacgatgataagatggccgctggacctgcccctgaagccagaagcctgatggacgagcagaccttcctggataacttcaacaacctgaagtaccccagaaagacctacctgtgctacgaggtggaactgctggtgggcgagaaccacatccctctggacgactacaagggcttcgtgcacaacgagggctttgatatgggcctggaacggtgccacgccgagctgatcttcctggaaagaatggcctcttggaatctggacaccgagctgagataccggatcaccgtgttcatctcttggtccccatgtcctgagtgcgccgacgagctggttaagttcctgcgggaaaatagacacgtgaacctgagaatctttgccgctagaatctacgactggtatcagggctacgaggccggcctgcgggccctgaaagccgccggagccgaagtggccatgatgaccctgcacgagttcgagtactgctggaacaacttcgtggaccaccagcaggacgaagatacacctttccccccctgggacaacctggtcgccagatccgaggaactgagccagagactggaaggcatcctgcagcctagcgtgctggtgttctgctggcctagccaagtgtccgtgaccgccgcccacagcgacatcatgagccaggcctctagagcctgggagaagcggcgggacccccccagcggcggatctagcggcggctctagcggcagtgaaacccctggtacaagcgagtctgccacacctgagagcagcggcggaagcagcggaggaagcatgagagagctggactacagaattggcctggccatcggcaccaacagcatcggatggggcgtgatcgagctgtcctggaacaaagaccgggagagatacgagaaggtcagaatcgtggatcaaggcgtgagaatgttcgacagagccgagatgcccaagacaggcgccagcttagctgaacccagaagaatcgccagatccagcagacggagactgaatcgcaagtcccagagaaagaaaaacatccggaacctgctggtgcaacacggcgtgatcacacaggaggaactggatagcctgtaccccctgagcaaaaagagcatggacatctggggcattcggctcgacggcctggacagactcctcaatcatttcgagtgggccagactgctgatccacctggctcagagacggggctttaagtccaacagaaagagtgaactgaaagatacagagacaggcaaggtgctgagcagcatccaactgaacgagaaacggctgagcttgtatagaaccgtgggcgagatgtggatgaaggaccccgacttctctaaatacgataggaagagaaatagccccaacgaatacgtgttcagcgtgtctagagccgagctggaaaaggaaatcgtgaccctgttcgccgcccagcggagattccagagcccttacgccagcaaagatctgcaggagacatatctgcagatctggacccaccaactgcctttcgccagcggcaatgccatcctgaacaaggtcggatactgctccctgttgaaaggcaaagaaagaaggattcccaaggctacatacaccttccaatacttctctgctctggaccaggtgaatcggaccagactgggacctgatttccagcccttcaccaaggagcaacgggaaattatcttgaacaacatgttccagaggacagattactacaagaagaaaaccatccccgaggtgacctactatgacatacggaagtggctggaattggacgagacaattcagttcaagggcctgaactacgaccctaacgaggaactgaagaagatcgagaagaagccttttatcaatctgaaggccttctacgagatcaacaaggtggtggccaactacagcgaaagaaccaacgagaccttctccaccctggactacgacggcatcggctacgccctgaccgtgtacaaaaccgacaaggatatccgcagctacctgaagagcagtcacaacctacctaagagatgctacgacgaccaactgatcgaggaactgctgagcctgagctacacaaagttcggccacctgtccctgaaagccatcaaccacgtgctgtctatcatgcagaagggcaatacctacaaggaagccgtggaccaactgggctacgacaccagcggccttaagaaggagaagaggtccaagttcctgccacctatttctgatgaaatcacgaatccaatcgtgaaaagggccctgacccaggccagaaaagtggtgaacgccataattagaagacacggatctcctcactccgtgcacatcgagctggccagagagctgagcaagaaccacgacgagcggacaaagatcgtcagcgcccaggatgaaaactacaagaaaaacaagggcgctatcagcatcctgtctgagcacggcatcctgaaccctacaggctacgacatcgtgagatacaaactgtggaaggagcagggcgaacggtgcgcctacagcctgaaggaaatccctgccgatacatttttcaacgagctgaagaaggaacgcaacggcgcccctatccttgaagtggaccacatcctgccctacagccagtccttcatcgactcctaccacaacaaggtcctggtgtacagcgacgaaaaccggaaaaagggcaacagaatcccttatacctacttcctggaaaccaacaaggattgggaggcctttgagcggtacgtgcggagcaacaaattcttctccaagaaaaagcgagagtaccttctgaagcgggcttatctgcctagagaatctgagctgatcaaagaacgccacctgaacgacaccagatacgcctctaccttcctgaagaacttcatcgagcagaacctgcagttcaaggaagccgaggacaaccccagaaaaagacgggtgcaaaccgtgaacggcgttatcaccgcccacttcagaaagcggtggggcctggagaaggaccggcaggagacatacctccatcacgctatggacgccatcatcgtggcttgtacagaccaccacatggtcaccagagtgaccgagtactatcagatcaaggaaagcaacaagagcgtgaagaagccctattttcctatgccttgggaaggcttccgggacgagctgctgagccacttggcttctcagcctatcgccaagaaaatcagcgaggaactgaaggccggctaccagagcctggactacatcttcgtgtccagaatgcctaagagaagcattacaggcgctgctcataagcagaccatcatgcggaagggaggaattgacaagaagggcaaaacaatcatcatcgaacggctgcacctgaaggatatcaagttcgacgagaacggagatttcaagatggtgggcaaggaacaggacatggccacatacgaagctattaaacagagatacctggagcacggcaagaatagcaagaaggccttcgagacccctctgtacaagcccagcaaaaagggcacaggtaacctgatcaagcgggtgaaggtggaaggacaggccaagagctttgtgagggaagtgaacggcggagtggcccaaaatggcgatctggttagagttgatttgtttgagaaggatgataagtactacatggtccccatctacgtgccagacaccgtgtgtagcgagctgcccaaaaaggtggtcgccagctctaagggctatgagcagtggctgacactggataacagcttcacctttaagttcagcctgtacccttatgatctggtgcggctggtcaagggagatgaggatcggttcctgtactttggcaccctggacatcgacagcgacagacttaacttcaaggacgtgaacaagccaagcaagaagaacgagtaccggtacagcttgaaaaccatcgaggacttggagaagtacgaggtgggcgtgctgggcgatctaagactggtccggaaggaaactcgaagaaacttccacagtggaggcagcggcggatctggaggcagcatgaccatcgagaacgagctgaaggaatacatcactgatctgttcgagctgcccaaggacgagcagtggctgtgcgaggccgtggacgaggtggccgataacatcctgcctgatgagtacgtgaccttgggccctctgagaaacaagaccctggaaaccttcacctactacagcaacacactgcacgagcggaacatctaccccttcatcctgtactaccagaacagactgatcgccataggatatatcgacgaaaactacgagatggacttcatgtacctgcacaacaccgccatcaccctgatcgaccagagatacctgattgataagggcgacgacaaccacgacagcggcggaagcaaaagacctgccgctacaaagaaggccggccaggccaagaaaaagaag

SEQ ID NO: 52 - DNA, 4530 bp, Artificial Sequence
  APG09980_nAPG07433.1_APG05198
atggcccctaagaagaaaagaaaggtggactacaaggaccacgacggcgactacaaagatcacgatatcgactacaaggacgacgatgataagatggccgctggacctgcccctgaagccagaagcctgatggacgagcagaccttcctggataacttcaacaacctgaagtaccccagaaagacctacctgtgctacgaggtggaactgctggtgggcgagaaccacatccctctggacgactacaagggcttcgtgcacaacgagggctttgatatgggcctggaacggtgccacgccgagctgatcttcctggaaagaatggcctcttggaatctggacaccgagctgagataccggatcaccgtgttcatctcttggtccccatgtcctgagtgcgccgacgagctggttaagttcctgcgggaaaatagacacgtgaacctgagaatctttgccgctagaatctacgactggtatcagggctacgaggccggcctgcgggccctgaaagccgccggagccgaagtggccatgatgaccctgcacgagttcgagtactgctggaacaacttcgtggaccaccagcaggacgaagatacacctttccccccctgggacaacctggtcgccagatccgaggaactgagccagagactggaaggcatcctgcagcctagcgtgctggtgttctgctggcctagccaagtgtccgtgaccgccgcccacagcgacatcatgagccaggcctctagagcctgggagaagcggcgggacccccccagcggcggatctagcggcggctctagcggcagtgaaacccctggtacaagcgagtctgccacacctgagagcagcggcggaagcagcggaggaagcatgagagagctggactacagaattggcctggccatcggcaccaacagcatcggatggggcgtgatcgagctgtcctggaacaaagaccgggagagatacgagaaggtcagaatcgtggatcaaggcgtgagaatgttcgacagagccgagatgcccaagacaggcgccagcttagctgaacccagaagaatcgccagatccagcagacggagactgaatcgcaagtcccagagaaagaaaaacatccggaacctgctggtgcaacacggcgtgatcacacaggaggaactggatagcctgtaccccctgagcaaaaagagcatggacatctggggcattcggctcgacggcctggacagactcctcaatcatttcgagtgggccagactgctgatccacctggctcagagacggggctttaagtccaacagaaagagtgaactgaaagatacagagacaggcaaggtgctgagcagcatccaactgaacgagaaacggctgagcttgtatagaaccgtgggcgagatgtggatgaaggaccccgacttctctaaatacgataggaagagaaatagccccaacgaatacgtgttcagcgtgtctagagccgagctggaaaaggaaatcgtgaccctgttcgccgcccagcggagattccagagcccttacgccagcaaagatctgcaggagacatatctgcagatctggacccaccaactgcctttcgccagcggcaatgccatcctgaacaaggtcggatactgctccctgttgaaaggcaaagaaagaaggattcccaaggctacatacaccttccaatacttctctgctctggaccaggtgaatcggaccagactgggacctgatttccagcccttcaccaaggagcaacgggaaattatcttgaacaacatgttccagaggacagattactacaagaagaaaaccatccccgaggtgacctactatgacatacggaagtggctggaattggacgagacaattcagttcaagggcctgaactacgaccctaacgaggaactgaagaagatcgagaagaagccttttatcaatctgaaggccttctacgagatcaacaaggtggtggccaactacagcgaaagaaccaacgagaccttctccaccctggactacgacggcatcggctacgccctgaccgtgtacaaaaccgacaaggatatccgcagctacctgaagagcagtcacaacctacctaagagatgctacgacgaccaactgatcgaggaactgctgagcctgagctacacaaagttcggccacctgtccctgaaagccatcaaccacgtgctgtctatcatgcagaagggcaatacctacaaggaagccgtggaccaactgggctacgacaccagcggccttaagaaggagaagaggtccaagttcctgccacctatttctgatgaaatcacgaatccaatcgtgaaaagggccctgacccaggccagaaaagtggtgaacgccataattagaagacacggatctcctcactccgtgcacatcgagctggccagagagctgagcaagaaccacgacgagcggacaaagatcgtcagcgcccaggatgaaaactacaagaaaaacaagggcgctatcagcatcctgtctgagcacggcatcctgaaccctacaggctacgacatcgtgagatacaaactgtggaaggagcagggcgaacggtgcgcctacagcctgaaggaaatccctgccgatacatttttcaacgagctgaagaaggaacgcaacggcgcccctatccttgaagtggaccacatcctgccctacagccagtccttcatcgactcctaccacaacaaggtcctggtgtacagcgacgaaaaccggaaaaagggcaacagaatcccttatacctacttcctggaaaccaacaaggattgggaggcctttgagcggtacgtgcggagcaacaaattcttctccaagaaaaagcgagagtaccttctgaagcgggcttatctgcctagagaatctgagctgatcaaagaacgccacctgaacgacaccagatacgcctctaccttcctgaagaacttcatcgagcagaacctgcagttcaaggaagccgaggacaaccccagaaaaagacgggtgcaaaccgtgaacggcgttatcaccgcccacttcagaaagcggtggggcctggagaaggaccggcaggagacatacctccatcacgctatggacgccatcatcgtggcttgtacagaccaccacatggtcaccagagtgaccgagtactatcagatcaaggaaagcaacaagagcgtgaagaagccctattttcctatgccttgggaaggcttccgggacgagctgctgagccacttggcttctcagcctatcgccaagaaaatcagcgaggaactgaaggccggctaccagagcctggactacatcttcgtgtccagaatgcctaagagaagcattacaggcgctgctcataagcagaccatcatgcggaagggaggaattgacaagaagggcaaaacaatcatcatcgaacggctgcacctgaaggatatcaagttcgacgagaacggagatttcaagatggtgggcaaggaacaggacatggccacatacgaagctattaaacagagatacctggagcacggcaagaatagcaagaaggccttcgagacccctctgtacaagcccagcaaaaagggcacaggtaacctgatcaagcgggtgaaggtggaaggacaggccaagagctttgtgagggaagtgaacggcggagtggcccaaaatggcgatctggttagagttgatttgtttgagaaggatgataagtactacatggtccccatctacgtgccagacaccgtgtgtagcgagctgcccaaaaaggtggtcgccagctctaagggctatgagcagtggctgacactggataacagcttcacctttaagttcagcctgtacccttatgatctggtgcggctggtcaagggagatgaggatcggttcctgtactttggcaccctggacatcgacagcgacagacttaacttcaaggacgtgaacaagccaagcaagaagaacgagtaccggtacagcttgaaaaccatcgaggacttggagaagtacgaggtgggcgtgctgggcgatctaagactggtccggaaggaaactcgaagaaacttccacagtggaggcagcggcggatctggaggcagcatgaccctggaaaagcaactgaaggaatacatcaccaacctgttcaacctgcccaaggacgagaagtgggagtgcgagagcatcgaggaagtggccgacaacatcctgcctgatcagtacatcagactgggccctctgaccaacaagatcctgcatacatacacctactacagcgacaccctgcacgagcggcacatctaccccttcatcctttattaccagaaacaactgatcgccatcggctacatcgacgagacaaacgacatggacttcctgtacctgcacaacaccgtgatgcctctgctggaccagagacacctgctggaaaaagagaactacaacaacgagagcggcggaagcaaaagacctgccgctacaaagaaggccggccaggccaagaaaaagaag

SEQ ID NO: 53 - DNA, 4014 bp, Artificial Sequence
  APG07386-CTD_nAPG07433.1
atggcccctaagaagaaaagaaaggtggactacaaggaccacgacggcgactacaaagatcacgatatcgactacaaggacgacgatgataagatggaggccacctacccccacatcttctacttccacttcaagaacctgcggaaggcctacggcagaaacgaaacctggctgtgtttcacaatggaaatcatcaagcagcacagcaccgtgttctgggagacaggcgtgttcagaaatcaagtgtaccctgagagcctgtgccacgccgaaagatgctttctgagctggttctgtgaagatatcctgagccctaacaccgactaccgggtgacatggtacacaagctggtccccatgtctggattgcgccggcgaggtggccgagttcctggccaggcattctaacgtgaagctggctatctttgccgctagactgtactatttctgggaccctcactaccagcagggcctgagaagcctgagcgagaagggagccagcgtggaaatcatgggctacaaggacttcaaatactgctgggaaaactttgtgtacaacggcgacgagccattcaagccctggaagggcctgaagtacaacttcctgttcctggacagcaagctgcaggagattctgcagagcggcggatctagcggcggctctagcggcagtgaaacccctggtacaagcgagtctgccacacctgagagcagcggcggaagcagcggaggaagcatgagagagctggactacagaattggcctggccatcggcaccaacagcatcggatggggcgtgatcgagctgtcctggaacaaagaccgggagagatacgagaaggtcagaatcgtggatcaaggcgtgagaatgttcgacagagccgagatgcccaagacaggcgccagcttagctgaacccagaagaatcgccagatccagcagacggagactgaatcgcaagtcccagagaaagaaaaacatccggaacctgctggtgcaacacggcgtgatcacacaggaggaactggatagcctgtaccccctgagcaaaaagagcatggacatctggggcattcggctcgacggcctggacagactcctcaatcatttcgagtgggccagactgctgatccacctggctcagagacggggctttaagtccaacagaaagagtgaactgaaagatacagagacaggcaaggtgctgagcagcatccaactgaacgagaaacggctgagcttgtatagaaccgtgggcgagatgtggatgaaggaccccgacttctctaaatacgataggaagagaaatagccccaacgaatacgtgttcagcgtgtctagagccgagctggaaaaggaaatcgtgaccctgttcgccgcccagcggagattccagagcccttacgccagcaaagatctgcaggagacatatctgcagatctggacccaccaactgcctttcgccagcggcaatgccatcctgaacaaggtcggatactgctccctgttgaaaggcaaagaaagaaggattcccaaggctacatacaccttccaatacttctctgctctggaccaggtgaatcggaccagactgggacctgatttccagcccttcaccaaggagcaacgggaaattatcttgaacaacatgttccagaggacagattactacaagaagaaaaccatccccgaggtgacctactatgacatacggaagtggctggaattggacgagacaattcagttcaagggcctgaactacgaccctaacgaggaactgaagaagatcgagaagaagccttttatcaatctgaaggccttctacgagatcaacaaggtggtggccaactacagcgaaagaaccaacgagaccttctccaccctggactacgacggcatcggctacgccctgaccgtgtacaaaaccgacaaggatatccgcagctacctgaagagcagtcacaacctacctaagagatgctacgacgaccaactgatcgaggaactgctgagcctgagctacacaaagttcggccacctgtccctgaaagccatcaaccacgtgctgtctatcatgcagaagggcaatacctacaaggaagccgtggaccaactgggctacgacaccagcggccttaagaaggagaagaggtccaagttcctgccacctatttctgatgaaatcacgaatccaatcgtgaaaagggccctgacccaggccagaaaagtggtgaacgccataattagaagacacggatctcctcactccgtgcacatcgagctggccagagagctgagcaagaaccacgacgagcggacaaagatcgtcagcgcccaggatgaaaactacaagaaaaacaagggcgctatcagcatcctgtctgagcacggcatcctgaaccctacaggctacgacatcgtgagatacaaactgtggaaggagcagggcgaacggtgcgcctacagcctgaaggaaatccctgccgatacatttttcaacgagctgaagaaggaacgcaacggcgcccctatccttgaagtggaccacatcctgccctacagccagtccttcatcgactcctaccacaacaaggtcctggtgtacagcgacgaaaaccggaaaaagggcaacagaatcccttatacctacttcctggaaaccaacaaggattgggaggcctttgagcggtacgtgcggagcaacaaattcttctccaagaaaaagcgagagtaccttctgaagcgggcttatctgcctagagaatctgagctgatcaaagaacgccacctgaacgacaccagatacgcctctaccttcctgaagaacttcatcgagcagaacctgcagttcaaggaagccgaggacaaccccagaaaaagacgggtgcaaaccgtgaacggcgttatcaccgcccacttcagaaagcggtggggcctggagaaggaccggcaggagacatacctccatcacgctatggacgccatcatcgtggcttgtacagaccaccacatggtcaccagagtgaccgagtactatcagatcaaggaaagcaacaagagcgtgaagaagccctattttcctatgccttgggaaggcttccgggacgagctgctgagccacttggcttctcagcctatcgccaagaaaatcagcgaggaactgaaggccggctaccagagcctggactacatcttcgtgtccagaatgcctaagagaagcattacaggcgctgctcataagcagaccatcatgcggaagggaggaattgacaagaagggcaaaacaatcatcatcgaacggctgcacctgaaggatatcaagttcgacgagaacggagatttcaagatggtgggcaaggaacaggacatggccacatacgaagctattaaacagagatacctggagcacggcaagaatagcaagaaggccttcgagacccctctgtacaagcccagcaaaaagggcacaggtaacctgatcaagcgggtgaaggtggaaggacaggccaagagctttgtgagggaagtgaacggcggagtggcccaaaatggcgatctggttagagttgatttgtttgagaaggatgataagtactacatggtccccatctacgtgccagacaccgtgtgtagcgagctgcccaaaaaggtggtcgccagctctaagggctatgagcagtggctgacactggataacagcttcacctttaagttcagcctgtacccttatgatctggtgcggctggtcaagggagatgaggatcggttcctgtactttggcaccctggacatcgacagcgacagacttaacttcaaggacgtgaacaagccaagcaagaagaacgagtaccggtacagcttgaaaaccatcgaggacttggagaagtacgaggtgggcgtgctgggcgatctaagactggtccggaaggaaactcgaagaaacttccacagcggcggaagcaaaagacctgccgctacaaagaaggccggccaggccaagaaaaagaagtaatga

SEQ ID NO: 54 - DNA, 4386 bp, Artificial Sequence
  APG07386-CTD_nAPG07433.1_APG03399
atggcccctaagaagaaaagaaaggtggactacaaggaccacgacggcgactacaaagatcacgatatcgactacaaggacgacgatgataagatggaggccacctacccccacatcttctacttccacttcaagaacctgcggaaggcctacggcagaaacgaaacctggctgtgtttcacaatggaaatcatcaagcagcacagcaccgtgttctgggagacaggcgtgttcagaaatcaagtgtaccctgagagcctgtgccacgccgaaagatgctttctgagctggttctgtgaagatatcctgagccctaacaccgactaccgggtgacatggtacacaagctggtccccatgtctggattgcgccggcgaggtggccgagttcctggccaggcattctaacgtgaagctggctatctttgccgctagactgtactatttctgggaccctcactaccagcagggcctgagaagcctgagcgagaagggagccagcgtggaaatcatgggctacaaggacttcaaatactgctgggaaaactttgtgtacaacggcgacgagccattcaagccctggaagggcctgaagtacaacttcctgttcctggacagcaagctgcaggagattctgcagagcggcggatctagcggcggctctagcggcagtgaaacccctggtacaagcgagtctgccacacctgagagcagcggcggaagcagcggaggaagcatgagagagctggactacagaattggcctggccatcggcaccaacagcatcggatggggcgtgatcgagctgtcctggaacaaagaccgggagagatacgagaaggtcagaatcgtggatcaaggcgtgagaatgttcgacagagccgagatgcccaagacaggcgccagcttagctgaacccagaagaatcgccagatccagcagacggagactgaatcgcaagtcccagagaaagaaaaacatccggaacctgctggtgcaacacggcgtgatcacacaggaggaactggatagcctgtaccccctgagcaaaaagagcatggacatctggggcattcggctcgacggcctggacagactcctcaatcatttcgagtgggccagactgctgatccacctggctcagagacggggctttaagtccaacagaaagagtgaactgaaagatacagagacaggcaaggtgctgagcagcatccaactgaacgagaaacggctgagcttgtatagaaccgtgggcgagatgtggatgaaggaccccgacttctctaaatacgataggaagagaaatagccccaacgaatacgtgttcagcgtgtctagagccgagctggaaaaggaaatcgtgaccctgttcgccgcccagcggagattccagagcccttacgccagcaaagatctgcaggagacatatctgcagatctggacccaccaactgcctttcgccagcggcaatgccatcctgaacaaggtcggatactgctccctgttgaaaggcaaagaaagaaggattcccaaggctacatacaccttccaatacttctctgctctggaccaggtgaatcggaccagactgggacctgatttccagcccttcaccaaggagcaacgggaaattatcttgaacaacatgttccagaggacagattactacaagaagaaaaccatccccgaggtgacctactatgacatacggaagtggctggaattggacgagacaattcagttcaagggcctgaactacgaccctaacgaggaactgaagaagatcgagaagaagccttttatcaatctgaaggccttctacgagatcaacaaggtggtggccaactacagcgaaagaaccaacgagaccttctccaccctggactacgacggcatcggctacgccctgaccgtgtacaaaaccgacaaggatatccgcagctacctgaagagcagtcacaacctacctaagagatgctacgacgaccaactgatcgaggaactgctgagcctgagctacacaaagttcggccacctgtccctgaaagccatcaaccacgtgctgtctatcatgcagaagggcaatacctacaaggaagccgtggaccaactgggctacgacaccagcggccttaagaaggagaagaggtccaagttcctgccacctatttctgatgaaatcacgaatccaatcgtgaaaagggccctgacccaggccagaaaagtggtgaacgccataattagaagacacggatctcctcactccgtgcacatcgagctggccagagagctgagcaagaaccacgacgagcggacaaagatcgtcagcgcccaggatgaaaactacaagaaaaacaagggcgctatcagcatcctgtctgagcacggcatcctgaaccctacaggctacgacatcgtgagatacaaactgtggaaggagcagggcgaacggtgcgcctacagcctgaaggaaatccctgccgatacatttttcaacgagctgaagaaggaacgcaacggcgcccctatccttgaagtggaccacatcctgccctacagccagtccttcatcgactcctaccacaacaaggtcctggtgtacagcgacgaaaaccggaaaaagggcaacagaatcccttatacctacttcctggaaaccaacaaggattgggaggcctttgagcggtacgtgcggagcaacaaattcttctccaagaaaaagcgagagtaccttctgaagcgggcttatctgcctagagaatctgagctgatcaaagaacgccacctgaacgacaccagatacgcctctaccttcctgaagaacttcatcgagcagaacctgcagttcaaggaagccgaggacaaccccagaaaaagacgggtgcaaaccgtgaacggcgttatcaccgcccacttcagaaagcggtggggcctggagaaggaccggcaggagacatacctccatcacgctatggacgccatcatcgtggcttgtacagaccaccacatggtcaccagagtgaccgagtactatcagatcaaggaaagcaacaagagcgtgaagaagccctattttcctatgccttgggaaggcttccgggacgagctgctgagccacttggcttctcagcctatcgccaagaaaatcagcgaggaactgaaggccggctaccagagcctggactacatcttcgtgtccagaatgcctaagagaagcattacaggcgctgctcataagcagaccatcatgcggaagggaggaattgacaagaagggcaaaacaatcatcatcgaacggctgcacctgaaggatatcaagttcgacgagaacggagatttcaagatggtgggcaaggaacaggacatggccacatacgaagctattaaacagagatacctggagcacggcaagaatagcaagaaggccttcgagacccctctgtacaagcccagcaaaaagggcacaggtaacctgatcaagcgggtgaaggtggaaggacaggccaagagctttgtgagggaagtgaacggcggagtggcccaaaatggcgatctggttagagttgatttgtttgagaaggatgataagtactacatggtccccatctacgtgccagacaccgtgtgtagcgagctgcccaaaaaggtggtcgccagctctaagggctatgagcagtggctgacactggataacagcttcacctttaagttcagcctgtacccttatgatctggtgcggctggtcaagggagatgaggatcggttcctgtactttggcaccctggacatcgacagcgacagacttaacttcaaggacgtgaacaagccaagcaagaagaacgagtaccggtacagcttgaaaaccatcgaggacttggagaagtacgaggtgggcgtgctgggcgatctaagactggtccggaaggaaactcgaagaaacttccacagtggaggcagcggcggatctggaggcagcatgaaaaccaccacacaggagctgaagcagtacatcaccagactgttccaactgagcaacaacgagacatgggagtgcgaggccctggaagaggccgccgagaacatcctgcctgagagattcatcaacaacagcctgctggcccacctgacactgaacacctacacctactacaacgatgagctgcacgagctttctatctaccccttcctgatgtacgccaacgaccaactgatcagcatcggctacctggaccacttcgacatggacttcctttatctgaccgacaccaagaacaccatcatcgacgagcggcacctgctgaaacagggcgagaacaaccacgagagcggcggaagcaaaagacctgccgctacaaagaaggccggccaggccaagaaaaagaag

SEQ ID NO: 55 - DNA, 4386 bp, Artificial Sequence
  APG07386-CTD_nAPG07433.1_APG06702
atggcccctaagaagaaaagaaaggtggactacaaggaccacgacggcgactacaaagatcacgatatcgactacaaggacgacgatgataagatggaggccacctacccccacatcttctacttccacttcaagaacctgcggaaggcctacggcagaaacgaaacctggctgtgtttcacaatggaaatcatcaagcagcacagcaccgtgttctgggagacaggcgtgttcagaaatcaagtgtaccctgagagcctgtgccacgccgaaagatgctttctgagctggttctgtgaagatatcctgagccctaacaccgactaccgggtgacatggtacacaagctggtccccatgtctggattgcgccggcgaggtggccgagttcctggccaggcattctaacgtgaagctggctatctttgccgctagactgtactatttctgggaccctcactaccagcagggcctgagaagcctgagcgagaagggagccagcgtggaaatcatgggctacaaggacttcaaatactgctgggaaaactttgtgtacaacggcgacgagccattcaagccctggaagggcctgaagtacaacttcctgttcctggacagcaagctgcaggagattctgcagagcggcggatctagcggcggctctagcggcagtgaaacccctggtacaagcgagtctgccacacctgagagcagcggcggaagcagcggaggaagcatgagagagctggactacagaattggcctggccatcggcaccaacagcatcggatggggcgtgatcgagctgtcctggaacaaagaccgggagagatacgagaaggtcagaatcgtggatcaaggcgtgagaatgttcgacagagccgagatgcccaagacaggcgccagcttagctgaacccagaagaatcgccagatccagcagacggagactgaatcgcaagtcccagagaaagaaaaacatccggaacctgctggtgcaacacggcgtgatcacacaggaggaactggatagcctgtaccccctgagcaaaaagagcatggacatctggggcattcggctcgacggcctggacagactcctcaatcatttcgagtgggccagactgctgatccacctggctcagagacggggctttaagtccaacagaaagagtgaactgaaagatacagagacaggcaaggtgctgagcagcatccaactgaacgagaaacggctgagcttgtatagaaccgtgggcgagatgtggatgaaggaccccgacttctctaaatacgataggaagagaaatagccccaacgaatacgtgttcagcgtgtctagagccgagctggaaaaggaaatcgtgaccctgttcgccgcccagcggagattccagagcccttacgccagcaaagatctgcaggagacatatctgcagatctggacccaccaactgcctttcgccagcggcaatgccatcctgaacaaggtcggatactgctccctgttgaaaggcaaagaaagaaggattcccaaggctacatacaccttccaatacttctctgctctggaccaggtgaatcggaccagactgggacctgatttccagcccttcaccaaggagcaacgggaaattatcttgaacaacatgttccagaggacagattactacaagaagaaaaccatccccgaggtgacctactatgacatacggaagtggctggaattggacgagacaattcagttcaagggcctgaactacgaccctaacgaggaactgaagaagatcgagaagaagccttttatcaatctgaaggccttctacgagatcaacaaggtggtggccaactacagcgaaagaaccaacgagaccttctccaccctggactacgacggcatcggctacgccctgaccgtgtacaaaaccgacaaggatatccgcagctacctgaagagcagtcacaacctacctaagagatgctacgacgaccaactgatcgaggaactgctgagcctgagctacacaaagttcggccacctgtccctgaaagccatcaaccacgtgctgtctatcatgcagaagggcaatacctacaaggaagccgtggaccaactgggctacgacaccagcggccttaagaaggagaagaggtccaagttcctgccacctatttctgatgaaatcacgaatccaatcgtgaaaagggccctgacccaggccagaaaagtggtgaacgccataattagaagacacggatctcctcactccgtgcacatcgagctggccagagagctgagcaagaaccacgacgagcggacaaagatcgtcagcgcccaggatgaaaactacaagaaaaacaagggcgctatcagcatcctgtctgagcacggcatcctgaaccctacaggctacgacatcgtgagatacaaactgtggaaggagcagggcgaacggtgcgcctacagcctgaaggaaatccctgccgatacatttttcaacgagctgaagaaggaacgcaacggcgcccctatccttgaagtggaccacatcctgccctacagccagtccttcatcgactcctaccacaacaaggtcctggtgtacagcgacgaaaaccggaaaaagggcaacagaatcccttatacctacttcctggaaaccaacaaggattgggaggcctttgagcggtacgtgcggagcaacaaattcttctccaagaaaaagcgagagtaccttctgaagcgggcttatctgcctagagaatctgagctgatcaaagaacgccacctgaacgacaccagatacgcctctaccttcctgaagaacttcatcgagcagaacctgcagttcaaggaagccgaggacaaccccagaaaaagacgggtgcaaaccgtgaacggcgttatcaccgcccacttcagaaagcggtggggcctggagaaggaccggcaggagacatacctccatcacgctatggacgccatcatcgtggcttgtacagaccaccacatggtcaccagagtgaccgagtactatcagatcaaggaaagcaacaagagcgtgaagaagccctattttcctatgccttgggaaggcttccgggacgagctgctgagccacttggcttctcagcctatcgccaagaaaatcagcgaggaactgaaggccggctaccagagcctggactacatcttcgtgtccagaatgcctaagagaagcattacaggcgctgctcataagcagaccatcatgcggaagggaggaattgacaagaagggcaaaacaatcatcatcgaacggctgcacctgaaggatatcaagttcgacgagaacggagatttcaagatggtgggcaaggaacaggacatggccacatacgaagctattaaacagagatacctggagcacggcaagaatagcaagaaggccttcgagacccctctgtacaagcccagcaaaaagggcacaggtaacctgatcaagcgggtgaaggtggaaggacaggccaagagctttgtgagggaagtgaacggcggagtggcccaaaatggcgatctggttagagttgatttgtttgagaaggatgataagtactacatggtccccatctacgtgccagacaccgtgtgtagcgagctgcccaaaaaggtggtcgccagctctaagggctatgagcagtggctgacactggataacagcttcacctttaagttcagcctgtacccttatgatctggtgcggctggtcaagggagatgaggatcggttcctgtactttggcaccctggacatcgacagcgacagacttaacttcaaggacgtgaacaagccaagcaagaagaacgagtaccggtacagcttgaaaaccatcgaggacttggagaagtacgaggtgggcgtgctgggcgatctaagactggtccggaaggaaactcgaagaaacttccacagtggaggcagcggcggatctggaggcagcatgaccatcgagaacgagctgaaggaatacatcactgatctgttcgagctgcccaaggacgagcagtggctgtgcgaggccgtggacgaggtggccgataacatcctgcctgatgagtacgtgaccttgggccctctgagaaacaagaccctggaaaccttcacctactacagcaacacactgcacgagcggaacatctaccccttcatcctgtactaccagaacagactgatcgccataggatatatcgacgaaaactacgagatggacttcatgtacctgcacaacaccgccatcaccctgatcgaccagagatacctgattgataagggcgacgacaaccacgacagcggcggaagcaaaagacctgccgctacaaagaaggccggccaggccaagaaaaagaag

SEQ ID NO: 56 - DNA, 4386 bp, Artificial Sequence
  APG07386-CTD_nAPG07433.1_APG05198
atggcccctaagaagaaaagaaaggtggactacaaggaccacgacggcgactacaaagatcacgatatcgactacaaggacgacgatgataagatggaggccacctacccccacatcttctacttccacttcaagaacctgcggaaggcctacggcagaaacgaaacctggctgtgtttcacaatggaaatcatcaagcagcacagcaccgtgttctgggagacaggcgtgttcagaaatcaagtgtaccctgagagcctgtgccacgccgaaagatgctttctgagctggttctgtgaagatatcctgagccctaacaccgactaccgggtgacatggtacacaagctggtccccatgtctggattgcgccggcgaggtggccgagttcctggccaggcattctaacgtgaagctggctatctttgccgctagactgtactatttctgggaccctcactaccagcagggcctgagaagcctgagcgagaagggagccagcgtggaaatcatgggctacaaggacttcaaatactgctgggaaaactttgtgtacaacggcgacgagccattcaagccctggaagggcctgaagtacaacttcctgttcctggacagcaagctgcaggagattctgcagagcggcggatctagcggcggctctagcggcagtgaaacccctggtacaagcgagtctgccacacctgagagcagcggcggaagcagcggaggaagcatgagagagctggactacagaattggcctggccatcggcaccaacagcatcggatggggcgtgatcgagctgtcctggaacaaagaccgggagagatacgagaaggtcagaatcgtggatcaaggcgtgagaatgttcgacagagccgagatgcccaagacaggcgccagcttagctgaacccagaagaatcgccagatccagcagacggagactgaatcgcaagtcccagagaaagaaaaacatccggaacctgctggtgcaacacggcgtgatcacacaggaggaactggatagcctgtaccccctgagcaaaaagagcatggacatctggggcattcggctcgacggcctggacagactcctcaatcatttcgagtgggccagactgctgatccacctggctcagagacggggctttaagtccaacagaaagagtgaactgaaagatacagagacaggcaaggtgctgagcagcatccaactgaacgagaaacggctgagcttgtatagaaccgtgggcgagatgtggatgaaggaccccgacttctctaaatacgataggaagagaaatagccccaacgaatacgtgttcagcgtgtctagagccgagctggaaaaggaaatcgtgaccctgttcgccgcccagcggagattccagagcccttacgccagcaaagatctgcaggagacatatctgcagatctggacccaccaactgcctttcgccagcggcaatgccatcctgaacaaggtcggatactgctccctgttgaaaggcaaagaaagaaggattcccaaggctacatacaccttccaatacttctctgctctggaccaggtgaatcggaccagactgggacctgatttccagcccttcaccaaggagcaacgggaaattatcttgaacaacatgttccagaggacagattactacaagaagaaaaccatccccgaggtgacctactatgacatacggaagtggctggaattggacgagacaattcagttcaagggcctgaactacgaccctaacgaggaactgaagaagatcgagaagaagccttttatcaatctgaaggccttctacgagatcaacaaggtggtggccaactacagcgaaagaaccaacgagaccttctccaccctggactacgacggcatcggctacgccctgaccgtgtacaaaaccgacaaggatatccgcagctacctgaagagcagtcacaacctacctaagagatgctacgacgaccaactgatcgaggaactgctgagcctgagctacacaaagttcggccacctgtccctgaaagccatcaaccacgtgctgtctatcatgcagaagggcaatacctacaaggaagccgtggaccaactgggctacgacaccagcggccttaagaaggagaagaggtccaagttcctgccacctatttctgatgaaatcacgaatccaatcgtgaaaagggccctgacccaggccagaaaagtggtgaacgccataattagaagacacggatctcctcactccgtgcacatcgagctggccagagagctgagcaagaaccacgacgagcggacaaagatcgtcagcgcccaggatgaaaactacaagaaaaacaagggcgctatcagcatcctgtctgagcacggcatcctgaaccctacaggctacgacatcgtgagatacaaactgtggaaggagcagggcgaacggtgcgcctacagcctgaaggaaatccctgccgatacatttttcaacgagctgaagaaggaacgcaacggcgcccctatccttgaagtggaccacatcctgccctacagccagtccttcatcgactcctaccacaacaaggtcctggtgtacagcgacgaaaaccggaaaaagggcaacagaatcccttatacctacttcctggaaaccaacaaggattgggaggcctttgagcggtacgtgcggagcaacaaattcttctccaagaaaaagcgagagtaccttctgaagcgggcttatctgcctagagaatctgagctgatcaaagaacgccacctgaacgacaccagatacgcctctaccttcctgaagaacttcatcgagcagaacctgcagttcaaggaagccgaggacaaccccagaaaaagacgggtgcaaaccgtgaacggcgttatcaccgcccacttcagaaagcggtggggcctggagaaggaccggcaggagacatacctccatcacgctatggacgccatcatcgtggcttgtacagaccaccacatggtcaccagagtgaccgagtactatcagatcaaggaaagcaacaagagcgtgaagaagccctattttcctatgccttgggaaggcttccgggacgagctgctgagccacttggcttctcagcctatcgccaagaaaatcagcgaggaactgaaggccggctaccagagcctggactacatcttcgtgtccagaatgcctaagagaagcattacaggcgctgctcataagcagaccatcatgcggaagggaggaattgacaagaagggcaaaacaatcatcatcgaacggctgcacctgaaggatatcaagttcgacgagaacggagatttcaagatggtgggcaaggaacaggacatggccacatacgaagctattaaacagagatacctggagcacggcaagaatagcaagaaggccttcgagacccctctgtacaagcccagcaaaaagggcacaggtaacctgatcaagcgggtgaaggtggaaggacaggccaagagctttgtgagggaagtgaacggcggagtggcccaaaatggcgatctggttagagttgatttgtttgagaaggatgataagtactacatggtccccatctacgtgccagacaccgtgtgtagcgagctgcccaaaaaggtggtcgccagctctaagggctatgagcagtggctgacactggataacagcttcacctttaagttcagcctgtacccttatgatctggtgcggctggtcaagggagatgaggatcggttcctgtactttggcaccctggacatcgacagcgacagacttaacttcaaggacgtgaacaagccaagcaagaagaacgagtaccggtacagcttgaaaaccatcgaggacttggagaagtacgaggtgggcgtgctgggcgatctaagactggtccggaaggaaactcgaagaaacttccacagtggaggcagcggcggatctggaggcagcatgaccctggaaaagcaactgaaggaatacatcaccaacctgttcaacctgcccaaggacgagaagtgggagtgcgagagcatcgaggaagtggccgacaacatcctgcctgatcagtacatcagactgggccctctgaccaacaagatcctgcatacatacacctactacagcgacaccctgcacgagcggcacatctaccccttcatcctttattaccagaaacaactgatcgccatcggctacatcgacgagacaaacgacatggacttcctgtacctgcacaacaccgtgatgcctctgctggaccagagacacctgctggaaaaagagaactacaacaacgagagcggcggaagcaaaagacctgccgctacaaagaaggccggccaggccaagaaaaagaag

SEQ ID NO: 57 - DNA, 20 bp, Artificial Sequence
  SGN000143 target sequence
catggcagtacattagagca

SEQ ID NO: 58 - DNA, 20 bp, Artificial Sequence
  SGN000169 target sequence
cacatctcgagcaagacgtt

SEQ ID NO: 59 - DNA, 20 bp, Artificial Sequence
  SGN000173 target sequence
cttctatagcctccttcccc

SEQ ID NO: 60 - DNA, 25 bp, Artificial Sequence
  SGN000929 target sequence
atctggagggaacttacagcatatg

SEQ ID NO: 61 - DNA, 25 bp, Artificial Sequence
  SGN000930 target sequence
gaacaactcaaatggaaatgaatat

SEQ ID NO: 62 - DNA, 25 bp, Artificial Sequence
  SGN001101 target sequence
atattttctttaatggtgccaggca

SEQ ID NO: 63 - RNA, 130 nt, Artificial Sequence
  SGN000143 sgRNA sequence
cauggcaguacauuagagcagucauaguuccauuaaagccaaaaguggcuuugauguuucuaugauaaggguuucgacccguggcgucggggaucgccugcccauugaaaugggcuucuccccauuuauu

SEQ ID NO: 64 - RNA, 130 nt, Artificial Sequence
  SGN000169 sgRNA sequence
cacaucucgagcaagacguugucauaguuccauuaaagccaaaaguggcuuugauguuucuaugauaaggguuucgacccguggcgucggggaucgccugcccauugaaaugggcuucuccccauuuauu

SEQ ID NO: 65 - RNA, 130 nt, Artificial Sequence
  SGN000173 sgRNA sequence
cuucuauagccuccuuccccgucauaguuccauuaaagccaaaaguggcuuugauguuucuaugauaaggguuucgacccguggcgucggggaucgccugcccauugaaaugggcuucuccccauuuauu

SEQ ID NO: 66 - RNA, 135 nt, Artificial Sequence
  SGN000929 sgRNA sequence
aucuggagggaacuuacagcauauggucauaguuccaugaaagccaaaaguggcuuugauguuucuaugauaaggguuucggcccguggcgucggggaucgccugcccauuccgaugggcuucuccccauuuauu

SEQ ID NO: 67 - RNA, 135 nt, Artificial Sequence
  SGN000930 sgRNA sequence
gaacaacucaaauggaaaugaauaugucauaguuccaugaaagccaaaaguggcuuugauguuucuaugauaaggguuucggcccguggcgucggggaucgccugcccauuccgaugggcuucuccccauuuauu

SEQ ID NO: 68 - RNA, 130 nt, Artificial Sequence
  SGN001101 sgRNA sequence
auauuuucuuuaauggugccaggcagucauaguuccauuaaagccaaaaguggcuuugauguuucuaugauaaggguuucgacccguggcgucggggaucgccugcccauugaaaugggcuucuccccau

SEQ ID NO: 69 - DNA, 200 bp, Artificial Sequence
  SGN000143 genomic locus
gaagtcagcaatcttcagctctcccttgagccctaagagcagattttctggctttatgtctctgtgaatcaccttcttcccatggcagtacattagagcatctgccaactcctccatgatctgggaggggcaacgacaggcaatcagacaaggatggacctccagctacaagcagcacaccctcagcctcgagcccccta

SEQ ID NO: 70 - DNA, 200 bp, Artificial Sequence
  SGN000169 genomic locus
tccagcaggtcagcaaagaatttatagccccccttgagcacacagagggctacaatgtgatggcctcccatctccttcatcacatctcgagcaagacgttcagtcctacagaaataaaatcaggaatttaatagaaagtttcatacattaaactttataacaaacacctcttagtcattaaacttccacaccaacctggg

SEQ ID NO: 71 - DNA, 200 bp, Artificial Sequence
  SGN000173 genomic locus
gtataactggccagcctttaatacattgctgcttagagtcaaagcatgtacttagagttggtatgatttatctttttggtcttctatagcctccttccccatccccatcagtcttaatcagtcttgttacgttatgactaatctttggggatttgtgcagaatgttattttagataagcaaaaacgagcaaaatagggga

SEQ ID NO: 72 - DNA, 200 bp, Artificial Sequence
  SGN000929 genomic locus
gactctcccaccccagacctcctagttcttgggcaggtgaacaactacagcctttccatgcctccttgtggagagatctggagggaacttacagcatatgagcacctgctagggagagcccctggccctggcaggaccgatacctcggctcctggacaccatttctatttactcaatatacactgtttgtacaaagtaca

SEQ ID NO: 73 - DNA, 200 bp, Artificial Sequence
  SGN000930 genomic locus
tttatcatcacaatacctcgggtccagatgggccccttagtgagttccgctaccacaggaaggatgactcaataagaacaactcaaatggaaatgaatatgggcccagggtgggtgtgaggagtggcaggggattcttgagagacaggaccattgcccacagcctatgtgagtactgttgcttgtcttgaaagaaggcaa

SEQ ID NO: 74 - DNA, 200 bp, Artificial Sequence
  SGN001101 genomic locus
tttcttacctcttctagttggcatgctttgatgacgcttctgtatctatattcatcataggaaacaccaaagatgatattttctttaatggtgccaggcataatccaggaaaactgagaacagaatgaaattcttccactgtgcttaattttaccctctgaaggctccagttctcccataatcaccattagaagtgaagt

SEQ ID NO: 75 - protein, 9 aa, Artificial Sequence
  meganuclease family motif
LAGLIDADG

SEQ ID NO: 76 - protein, 182 aa, Artificial Sequence
  Truncated APG09980_cystidine deaminase
MDEQTFLDNFNNLKYPRKTYLCYEVELLVGENHIPLDDYKGFVHNEGFDMGLERCHAELIFLERMASWNLDTELRYRITVFISWSPCPECADELVKFLRENRHVNLRIFAARIYDWYQGYEAGLRALKAAGAEVAMMTLHEFEYCWNNFVDHQQDEDTPFPPWDNLVARSEELSQRLEGILQ

SEQ ID NO: 77 - protein, 201 aa, Artificial Sequence
  APG05840_cytidine deaminase
MEASPASRPRPLMDPHMFTGNFTNNPRVFGLHQTYLCYEVKRQGPDGTRDLMNEQRDFLCNQAKNHFSGSEDHHAERCFLDRIPSWQLDPAQTYRVTCFISWSPCFSCAQEVAEFLHENPHVNLRIFAARIYDYLPRYEEGLQMLQNAGAQVSIMTSEEFGHCWDTFVDRQGHPFQPWEGLDEHSQALSGRLQAILQNQGN

SEQ ID NO: 78 - protein, 185 aa, Artificial Sequence
  Truncated APG05840_cytidine deaminase
MDPHMFTGNFTNNPRVFGLHQTYLCYEVKRQGPDGTRDLMNEQRDFLCNQAKNHFSGSEDHHAERCFLDRIPSWQLDPAQTYRVTCFISWSPCFSCAQEVAEFLHENPHVNLRIFAARIYDYLPRYEEGLQMLQNAGAQVSIMTSEEFGHCWDTFVDRQGHPFQPWEGLDEHSQALSGRLQAILQ

SEQ ID NO: 79 - protein, 192 aa, Artificial Sequence
  APG00868_cytidine deaminase
MEPWRPSPRNPMDRIDPNTFRFHFPNLLYASGRKLCYLCFQVETGDYFSCDDSDRGVFRNKVHPWARCHAEQCFLSWFRDQYPCRDEYYNVTWFLSWSPCPTCAEEVVEFLEEYRNLTLSIFTSRLYYFYHPNYQQGLRKLWDAGVQLDIMSCDDFEHCWDNFVDHKGMRFQRRNLLKDYDFLAAELQEILR

SEQ ID NO: 80 - protein, 178 aa, Artificial Sequence
  Truncated APG00868_cytidine deaminase
MDPNTFRFHFPNLLYASGRKLCYLCFQVETGDYFSCDDSDRGVFRNKVHPWARCHAEQCFLSWFRDQYPCRDEYYNVTWFLSWSPCPTCAEEVVEFLEEYRNLTLSIFTSRLYYFYHPNYQQGLRKLWDAGVQLDIMSCDDFEHCWDNFVDHKGMRFQRRNLLKDYDFLAAELQEILR

SEQ ID NO: 81 - protein, 152 aa, Artificial Sequence
  APG30125_cytidine deaminase
MINLVQTPYDLNSGYPIVRRTLEDKKKLVKHEGFGPESCCATIEYTLRGNSRYAFGNSQMQVEMPPNIYAHNWVKLHGEMTALVAAIRRIERVDSTSAVLPITSAYIELRPCEASCLPALHNMLPDNITVYFSFLHPTQVDQWKQSARALCA

SEQ ID NO: 82 - protein, 152 aa, Artificial Sequence
  APG30126_cytidine deaminase
MPVLIKVPYDINSANGVVQACLRKKREVVQSKDNGGITGIGAGSCCSFVVYMKHGGDVDNVFGNSRIRIPFKVNGIEIANACAHGELTALWNAIADEPSIPTILAMYIEMSPCTKCQSALDNLLQPGQEIYYSFDHPGEVKAWQAAAKHLCA

SEQ ID NO: 83 - protein, 148 aa, Artificial Sequence
  APG30127_cytidine deaminsae
MIKTEYSLSSGYPIVRRTLEDKKNLVKQPGFGPESCCAVVQYRLRGNIRYAFGNSRMQISMPPGIYTHNWVRLHGEMAALVAAINRIERYSTDDVIPITAAYIELRPCEANCMQALRNILPEDACVYYSFDHPTQVDEWKLRANELCS

SEQ ID NO: 84 - protein, 147 aa, Artificial Sequence
  APG30128_cytidine deaminase
MIKTEYTLRSGYPIVRRTLENKKNLVKQPGFGPESCCAVVEYRLRGNIRYAFGNSRMQVSVPPGIYTNNWVRLHGEMAALVAAIERIERFSSDDVIPITAAYIELRPCEANCMQALHNILPENANVYYSFDHPTQVEEWKLRAHELC

SEQ ID NO: 85 - protein, 147 aa, Artificial Sequence
  APG30129_cytidine deaminase
MIKTEYALNSGYPIVRRTLEDKKKLVKQPGFGPESCCAVVEYRLRGNIRYAFGNSQMHVSMPPGIYTHNWVKLHGEMAALVAAINRIERFSTDDVIPITGAYIELRPCEANCLQALHNILPEDANVYYSFDHPTQLDEWKLRAHELC

SEQ ID NO: 86 - protein, 147 aa, Artificial Sequence
  APG30130_cytidine deaminase
MIQLVQAEYSIKSGYPIVRRTLEDKKKLIEKPGFGPESCCATIEYQLRGSTRYAFGNSQMKMEMPPDIYTHNWVKLHAEMAALVAAIRRIERFDADKEQVPITNVYIELRPCEANCMQALQNILPDGTTVYYSFLHPTEVEEWKRSA

SEQ ID NO: 87 - protein, 235 aa, Artificial Sequence
  APG05241_cytidine deaminase
MNSKTGPSVGDATLRRRIKPWEFVAFFNPQELRKETCLLYEIKWGNQNIWRHSNQNTSQHAEINFMEKFTAERHFNSSVRCSITWFLSWSPCWECSKAIRKFLDHYPNVTLAIFISRLYWHMDQQHRQGLKELVHSGVTIQIMSYSEYHYCWRNFVDYPQGEEDYWPKYPYLWIMLYVLELHCIILGLPPCLKISGSHSNQLALFSLDLQDCHYQKIPYNVLVATGLVQPFVTWR

SEQ ID NO: 88 - protein, 262 aa, Artificial Sequence
  APG07280_cytidine deaminase
MHHSARLPPNCIVSRYANAPWTVLPLPLPPTEAPATGDDTLRRRIEPWEFEAFFNPQELRREACLLYQITWSSHKVWRETAKNTVDSHVEVNFIQNLTAGRYCRPSTRCSILWFLSWSPCSSCSKAIRLFLSQHPGVSLVIYVARLFQHMDPQNRQGLRELIHSGVTIQVMRPQEYDYCWKNFVNYPPGQEEHWPRYPVQCMTLYNLELYCIIHNLPPCVRISKQRQSQLAFFSLGLENVHYQRIPPPLLLLTGLVFVFPWK

SEQ ID NO: 89 - protein, 211 aa, Artificial Sequence
  APG09260_cytidine deaminase
MEDFHCVCVYCPLQVSVMSDYQAASSSPDCPQCPQHILTGAEAAVSYSQFCETFGFHMGPSGARALLLFYELWGPSGTLVQRGQASNLLEVCEEVLYSNYMPCQECSQTLISFLLRYPWVRLDLLFSQLYHTAPSQTHSLDNQTGLRSLAVLTLSPNSGAAWGHLLRCFVRDVPPSALQLPLLPERVEADRVNAIHISATTGIGPAFWTSH

SEQ ID NO: 90 - protein, 234 aa, Artificial Sequence
  APG08360_cytidine deaminase
MDPQRLRQWPGPGPASRGGYGQRPRIRNPEEWFHELSPRTFSFHFRNLRFASGRNRSYICCQVEGKNCFFQGIFQNQKKRHAEIRFIDKINSLNLDQNQCYRIICYVTWSPCHNCAKELVDFISNRHHLSLQLFASRLYFHWVRCYQRGLQRLQANRVSVAVMKGPEFKDCWEKFVDHQGESFPSWEKLEQYSESISRRLSRILRFANQNNLEDSFRDLRLGSPSPSSSRSDSR

SEQ ID NO: 91 - protein, 395 aa, Artificial Sequence
  APG07386_cytidine deaminase
MNPQIRNPMEGMDRHAFNYNFENEPILYGRSYTWLCYEVKIRKDPSKLPWDTGVFRGQVRPKLQSNRRYELSNWECRKHVYFQPQYHAEMCFLSWFCGNQLPAHKRFQITWFVSWTPCPDCVAKVTEFLAEHPNVTLTISVARLYYYRGKDWRRALCRLHQAGARVKIMDYEEFAYCWENFVYNEGQSFMPWDKFDDNYAFLHHKLKEILRNPMEATYPHIFYFHFKNLRKAYGRNETWLCFTMEIIKQHSTVFWETGVFRNQVYPESLCHAERCFLSWFCEDILSPNTDYRVTWYTSWSPCLDCAGEVAEFLARHSNVKLAIFAARLYYFWDPHYQQGLRSLSEKGASVEIMGYKDFKYCWENFVYNGDEPFKPWKGLKYNFLFLDSKLQEILQ

SEQ ID NO: 92 - protein, 213 aa, Artificial Sequence
  APG07386-NTD_cytidine deaminase
MNPQIRNPMEGMDRHAFNYNFENEPILYGRSYTWLCYEVKIRKDPSKLPWDTGVFRGQVRPKLQSNRRYELSNWECRKHVYFQPQYHAEMCFLSWFCGNQLPAHKRFQITWFVSWTPCPDCVAKVTEFLAEHPNVTLTISVARLYYYRGKDWRRALCRLHQAGARVKIMDYEEFAYCWENFVYNEGQSFMPWDKFDDNYAFLHHKLKEILRNP

SEQ ID NO: 93 - protein, 267 aa, Artificial Sequence
  APG09688_cytidine deaminase
MGTPKDTKSRHLAGRCHELHNSRGRSPESDTMASEKGPSNKDYTLRRRIEPWEFEVFFDPQELRKEACLLYEIKWGASSKTWRSSGKNTTNHVEVNFLEKLTSEGRLGPSTCCSITWFLSWSPCWECSTAIREFLSQHPGVTLVIFVARLFQHMDRRNRQGLKDLVTSGVTVQVMSVSEYCYCWENFVNYPPGKAAQWPRYPPRWMLMYALELYCIILGLPPCLKISRRHQKQLTFFSLTPQYCHYKMIPPYILLATGLLQPSVPWR

SEQ ID NO: 94 - protein, 373 aa, Artificial Sequence
  APG02316_cytidine deaminase
MIENPALKISKRDRIKISNLKDLKNALKNENYNIKANDKEKFKDEVKKVFNINDDIFERLDKCLNRDITYKVDNVEDFIDYIKKIMIFEDKHEIICEKLKRIKKLYINREEYEREKSTRDNVEHIIEVIEKTKENVSRKISLEELERLEILEEELEDKYLFAKDIEFLKKMILGNCKNVIESYNEKTKIKTLKMKIPKEINYSYIKAKEGSVEYHQYLNNNINRMNRLIKSIDKYIEHYKDDIFNINQSLALQDSINIALATFDNKEFKAISGKNDIEDYCKVIPIEKSRFKSRKVNKLGELGIGYNRINDSEKKILEEIHEKIKQKILKDRGNLTLYTKWEPCPSCYFVISQFCEKYPNIKVEVKYNKKYGE

SEQ ID NO: 95 - protein, 1060 aa, Bacillus sp.
  MISC_FEATURE: APG00969_RGN
MKQTSYSLGLDIGIASVGYGLIDNDENIVDAGVRLFPEANSKNNDGRRKSRGSKRLIRRKRHRIARVKHLLKESGIDVSYENTVLTNPYEIRCKGLTLPLTNHELSIALLHLAKRRGVHNVKSMDQEKVKGNELSTKEQLTINDNLLEEKFICELQLERLNKEGIVRSHSNRFKTADYIKEIKNLLETQAKQNTLVTEEFIEKYIEIFSGRRKYYEGPGGESKYGWKGDIEKWYEGLMGKCTYFPKELRCVKHAYSAALFNLLNDLNNLSINREEDTKLSQYEKEQIIEKIFKVRKTPTLTQIAKLLKVDPTNIKGFRTKANGTPDFLSIKIYHDLKGIIDDKQLLDDIAFLDNVAQILTVWQDSQSIQEKLKTLNKNLDDKTIKEISELKKYTQTHSLSLKLINVLLPELWETTKNQMTILSELKLKPRKIDLHNCNEIPVNMINDLIVSPVVRRSLTQSIEMINQIIKDYGHPREIVIELAREKNSEEKKNFIKSLNEKNKQINDEVIEKLNASNHRDNKGMFNKVKLWILQDGHCLYSLKPIRLEDLLNNPNHYEIDHIIPKSVSFDDSMSNKVLVYQIENSKKGNRTPYQYLTSADKTITYEKFKANITQLAKSNHKISKKKLDYLLEERDINRFHIKKEFINRNLVDTRYATRSLINLLKYYFSEKDINVKVKSINGSFTDYLRKLWNFPKDREFYHKHHAEDALIIAMANKIFTTRKIFKEQNSVFSDEQILDGEVTNILSDDQFQAEFTEKFYKVQAIKKYDKYKYSHRVDKKPNRQLFDDTLYSTREFEGEEYYIGKIKDIYNLKDKRLKKIFTKSPEKILMYQHDSQTFKKLKQIMRSYEDEVNPLAKYHKETGEYLRKECKKGNGPIVKSLKYRVTKLGVHKDITHKYENSKNKVVILSLKPFRMDVFKENGVYKFITIRYCDLKETVNSYTISEHLYKAKLKAKDIKSMDSFKWSFYKNDLLEYNGELCTFKGVNDDKKNKIEVNWVEKNFAIYAEKKNLKSKQLVKSITKSTVKSLLKYTTDILGNRYPVRNEKLKLMIRKQTFRGDL

SEQ ID NO: 96 - protein, 1090 aa, Rhizobium sp.
  MISC_FEATURE: APG03128_RGN
MNNLLYSFDIGTNSIGWCVFALDEVGDPCRIVDLGARIYADGRDPQTKTSLAVARREARAMSRRRDRSLRRRKATLRTMIEYGLMPAHKVEQETLLRKTGDREGGDEGFNPYALRARALGEKLPPFYIGRALFHLGQRRGFKSNRKTDRKDNDKGKIALGIDELRAAMHRSGSPTLGAWLAMRRADGHPVRLRAGSEVFDAEGYAFYPERSLLEDEFRQIWTAQAVHHPQLLTSERRAHLFRVMFYQRPLKKPLVGRCSFNPAEARLSRAHPLFQEFRLYKEVNDLEVVLPDQSHRKLTLDERNALVAKLKSSRKASFSVLRRTLKLTPDLAFNKESEARKDLLGDEINSALADAKMFGVRWGGFPRARQWEIITHLKEEENPARLSDWLKSEFGLDDERVVAIANIALPEGYGRLGETALASMLEEMKTAVIPESEAAKRCGYDHSNLAKEQDEGLDILPEYQEILERHIPPGTGDPDDIYDIRKGRITNPTVHIGLNQLRRVVNALIKRHGKPRHIVVELARDLQLSEKQKADVNRRIAKNTREAEGRSQKLIEMGQLDTGYNRLLLKLWEELNQDKPEDRVCIYSGKPIGIAMLFSGEVDIDHILPWSKTLDDSQANKLLCLKSANRQKRNRTPSDVPEWRDCYEEVLARAARLPKNKRWRFAADAMQQFEAEGGFLARQLTDTQYLSRMAFEYLSALFPSEEADKWGELRQRKRVHVVPGRLTELLRRNWGLNTLLPDHNLGEMAQEKNRKDHRHHAIDAAVIGVTSRSLLQRMSGAAARLDDVAFDDLVRTVVKDNPPWPGFREELLGCINRVTVSHKPDHGTVSRAAYAQGKGQTAGKLHNDTAYGITGLQDMKGSPLVVRRKPFMALEVKDIASIRDTELQSALYDAIGSLTEKKALQEALVRFRDRHPQFKGIRRVRVLEALSVIPIVDNNGKAYKGYKGDANYRYEVWETLDGRWHTEVVSMFDAHQPGWQSPFHRQHPAARRVLKLQQNDMVAYEHPADGYTIARVVKFSNDKRIYFASHRESGSLKARDADKGDPFTYFAKANNGLRDIKCRQVRIDAAGRVFDPGPQDREARQSKGRA

SEQ ID NO: 97 - protein, 1108 aa, Brevibacillus sp.
  MISC_FEATURE: APG09748_RGN
MAIRSIKLKLKTRTGPEAQNLRKGIWRTHRLLNEGVAYYMKMLLLFRQESTGGQTKKELQEELVRHIREQQQKNRADKNTQALPLDKAFAALRQLYELLVPSSIGQSGDAQIISRKFLSPLVDPNSEGGKGTSKAGAKPTWQKKKEANDPTWEQDYEKWKKRREEDPTASVITTLEEYGIRPIFPLYTNTVADIAWLPLQSNQFVRTWDRDMLQQAIERLLSWESWNKRVQEEYSKLQEKMTQLNEQLEGGQEWISLLEQYEEQREQELIENMTAANDKYRITKRQMKGWNELYEQWSTVLPNASHEQYREALKRVQQRLRGRFGDAHFFQYLMKEEHHLIWKGNPQRIHYFVARNELKKRLEEAKQNATMTLPDARKHPLWVRFDARGGNLQDYYLTAEADNPRSRRFVTFSQLIWPNESGWMEKQDVEVELALSKQFYQQVTLQKNDKGKQEIEFKDKGSGSTFSGHLGGAKLQLERGDLEKEEKDFEGGEIGSVYLNIVIDFEPLQEVKNGRLQSPYGQVLQLVRRPNEFPKVTTYKSEELVEWIKSSTKDSAGVESLESGFRVMSIDLGLRTAAATSIFSVEESNDANAAGFSYWIEGTPLVAVHKRSYMLKLPGEQVEKQVREKRDERQDQQRRVRFQIRILSQVIRMAKKQNRERADELDHLSQALEKQKSLLDQTDRTFWNGIVCDLTDALREKEGGWEQAVVQIHRKAEEHVGKVVQAWRKRFDADERKGIAGLSMWSIEELDSLRKLLISWSRRTRNPREINCFEQGHTSHQRLLTHIQNVKEDRLKQLSHAIVMTALGYVYDEKKLEWFAKYPACQVILFENLSQYRSNMDRSTKENSTLMKWAHRSIPKYVHMQAEPYGIQIGDVRAEYSSRFHAKTGTPGIRCKMVSGHDLQGRRFENLQKRLISEQFLTEEQVKQLRPGDIVPDDSGEWFMTLSDGSEGKEVVFLQADINAAQNLQKRFWQRYNELFKVSCRVLIRGEEEYLIPKTKSVQAKLGKGLFVKKTDTVMKDVYVWDSQAKLKGKTTFTEESESPEQLEDFQEIIEEAEEAKGTYRTLFRDPSGVFFPEFVWSTQKDFWSEVKRRLYGKLRERFLMKTR

SEQ ID NO: 98 - protein, 1429 aa, Chryseobacterium sp.
  MISC_FEATURE: APG00771_RGN
MTKNILGLDLGTNSIGWALIKQDFENKQGEILGMGSRIIPMDAGDMGKFAEGATVSKTADRTKYRSVRRLRERFLLRRERLHRVLHLLNFLPQHYASQIDFEKRFGKFKVETEPKLAWKNIEGKFSFLFQNSFNEMLEDFKANEQDLKIPYDWTIYFLRKKALSQKIEKEELAWILLNFNQKRGYYQLRGEEEEENPNKLVEFYSLKVVDVLADEPQKGKSEIWYSLVLKNGWIYRRASKIPLFEWKDKTRDFIVTTDLNDDGSIKKDKDGNEKRSFRAPGENDWTLVKKKTEQEIEQSHKTVGTYIYETLLLNPKQKIKGKLVRTIERKFYKDELKQILEKQKEFHQELQNDDLYNDCIRELYRNNEAHQLTLSKKDFVHLLMDDLIFYQRPLRSQKSSISNCTLEFRKYKDENGIEHTQYLKAIPKSNPYYQEFRLWQWIYNLNIYRKDDEVNVTKDFLNTTKEFENLFEFLNSRKEVDQKALLKYFKLNEKTHRWNFVEDKKYPCNETKTMISSRLDKVENISDDFLTRNIEQKIWHIIYSVNDKIEYEKALKSFARKHHLDETSFFEAFRKFPPFKSEYGSFSEKAIKKLLPLMRLGKYWNYADIDKYSRERIQKIITGEYDENIKDKIREKAIHLTKENDFQGLQLWLAQYLVYGRHSEASMIGKWNSADDLEVFLKDFKQHSLRNPIVEQVITETLRVVKDIWLKYGNGTKDFFNEIHIELGREMKLPADDRKKLTSQISENENTNLRIKALLAEMINDHSVENVRPFSPMQQEILKIYEDGVLNSDIEIEDDILKISKTAQPSPSDLKRYKLWLEQKYKSPYTGQIIPLNKLFTPEYEIEHIIPQSRYFDDSFSNKVICESAVNKLKDNYIGLEFIKKLGGTVVECGNGKSVTVLKEDQYEDFVKKHYANNRGKRNKLLMEDIPEKMIERQLNDTRYISKYISGVLSNIVRVEDGSDEGINSKNIVPGNGKITSQLKQDWGLNDVWNDLILPRFERMNQLTNSTDFTAWNENYQKFLPTVPIEYSKGFSKKRIDHRHHALDALVIACATKDHVNLLNNQSAKSDTKRYDLKKKLMKFEKVVYHHTQTGEKIEREIPRQFLKPWENFTVDAKHNLESIIVSFKQNLRVINKATNYYEKYVEKDGTKNKERVEQTGTNWAIRKPMHKDTVSGKVDLPWVKVPKGKILTATRKSLDTSFDLKSIGSITDTGIQKILKNYLAFKDGNPEMAFSPEGIDDLNKNIEKYNDGKPHQPINKVRVFELGSKFQVGQTGNKKDKYVEAAKGTNLFFAVYEDEKGKRSYETIPLNEVIERQKQGLSVVDLKDTNDFYLCPNDLVYIPSGDELENVNNVDFKDIKKDKNERIYKVVSFSGSQIFFVRQDIATFIVNKAELSTLNKMERAIDGSMIKENCIKLNIDRLGNISKA

SEQ ID NO: 99 - protein, 1112 aa, Bacillus sp.
  MISC_FEATURE: APG02789_RGN
MAIRSIKLKMKTNSGTDSIYLRKALWRTHQLINEGIAYYMNLLTLYRQEAIGDKTKEAYQAELINIIRNQQRNNGSSEEHGSDQEILALLRQLYELIIPSSIGESGDANQLGNKFLYPLVDPNSQSGKGTSNAGRKPRWKRLKEEGNPDWELEKKKDEERKAKDPTVKIFDNLNKYGLLPLFPLFTNIQKDIEWLPLGKRQSVRKWDKDMFIQAIERLLSWESWNRRVADEYKQLKEKTESYYKEHLTGGEEWIEKIRKFEKERNMELEKNAFAPNDGYFITSRQIRGWDRVYEKWSKLPESASPEELWKVVAEQQNKMSEGFGDPKVFSFLANRENRDIWRGHSERIYHIAAYNGLQKKLSRTKEQATFTLPDAIEHPLWIRYESPGGTNLNLFKLEEKQKKNYYVTLSKIIWPSEEKWIEKENIEIPLAPSIQFNRQIKLKQHVKGKQEISFSDYSSRISLDGVLGGSRIQFNRKYIKNHKELLGEGDIGPVFFNLVVDVAPLQETRNGRLQSPIGKALKVISSDFSKVIDYKPKELMDWMNTGSASNSFGVASLLEGMRVMSIDMGQRTSASVSIFEVVKELPKDQEQKLFYSINDTELFAIHKRSFLLNLPGEVVTKNNKQQRQERRKKRQFVRSQIRMLANVLRLETKKTPDERKKAIHKLMEIVQSYDSWTASQKEVWEKELNLLTNMAAFNDEIWKESLVELHHRIEPYVGQIVSKWRKGLSEGRKNLAGISMWNIDELEDTRRLLISWSKRSRTPGEANRIETDEPFGSSLLQHIQNVKDDRLKQMANLIIMTALGFKYDKEEKDRYKRWKETYPACQIILFENLNRYLFNLDRSRRENSRLMKWAHRSIPRTVSMQGEMFGLQVGDVRSEYSSRFHAKTGAPGIRCHALTEEDLKAGSNTLKRLIEDGFINESELAYLKKGDIIPSQGGELFVTLSKRYKKDSDNNELTVIHADINAAQNLQKRFWQQNSEVYRVPCQLARMGEDKLYIPKSQTETIKKYFGKGSFVKNNTEQEVYKWEKSEKMKIKTDTTFDLQDLDGFEDISKTIELAQEQQKKYLTMFRDPSGYFFNNETWRPQKEYWSIVNNIIKSCLKKKILSNKVEL

SEQ ID NO: 100 - protein, 1070 aa, Bacillus sp.
  MISC_FEATURE: APG05083.1_RGN
MRELDYRIGLDIGTNSIGWGIIELSWNKDREQYEKARIVDKGVRMFDKAEIPKTGASLAEPRRIARSSRRRLNRKSQRKKDIRNLLVQHEIISQKELASLYPLTKSSMDIWDIRLDGLDRLLDRFEWTRLLIHLAQRRGFKSNRKSELKDVETGKVLSSIQANEKRLSLYRTVGEMWMKNEDFSKYDKRRNSSNEYVFSVSRADLEKEIVTLFEAQRKFQSSYASADLQKTYLQIWAHQLPFASGNAIVNKVGYCSLLKGKEKRVPKATYTFQYFSTLDQINRTRLGPNFQPFTKEQRDVILDEMFNRTDYYKKKTIPEVTYYDIRKWLALDETIQFKGLTYDPNEELKKIELKSFINLKPFYEIKKVVTNYAKKTNEAFSTLDYDTFAYALTVYKTDKDIRSYLKKSNNLSKCCYDDQLIEELLTLSYTKFGHLSFKAINHVLPIMQEGRTYQEAIHQLGYDATNLKKENRSMFLPLFPDEITNPIVKRALTQARKVVNAIIRRYGSPNSVHIELARELSKSHDERTKIMKAHDENYKKNKGAISILIENGILNPTGYDIVRYKLWKEQGERCAYSLKQIPANTFFNEMKKERSGSPVLEIDHILPYSQSFIDSYHNKVLVYGDENQKKGNRIPYTYFLEGNKDWESFESYVRLNSFFSKKKRGYLLKKAYLPRESNMIKERHLNDTRYASSYLKNFIEKNLKFKEVEGSTRKKHVQTVNGIITAHLRKRWGLEKDRQETYLHHAMDAIIVACTDHHMVTKVTEYYQIKESNKSIRKPYFPLPWVGFREEILSHLARQPIARKISEELKIGYQSFDYILVSRMPKRSVTGAAHEQTIMKKGGIDKKGKTIIIKRVYLKDIKFDENGDFKMVGKEQDLATYEAIKQRYIEYGKESKKAFETPLYKPSKKGKGNLIKKIKVEVQTKSFVREVNGGVAQNGDLVRVDLFEKDNRYYMIPIYVMDTVHSELPNKAVTSSKGYEQWLTIDNSFTFKFSLYPYDLVRLVKGNEDRFLYFSTLDINSDRLNFKDVNKPSKQAENRYSLKTIENLEKYEVGVLGDLRFVRQEIRKNF

SEQ ID NO: 101 - protein, 1071 aa, Bacillus sp.; identical to SEQ ID NO: 40
  MISC_FEATURE: APG07433.1_RGN

SEQ ID NO: 102 - protein, 1071 aa, Bacillus sp.
  MISC_FEATURE: APG07513.1_RGN
MRELDYRIGLDIGTNSIGWGVIELSWNKDREQYEKTRIVDKGVRMFDKAEIPKTGASLAEPRRIARSSRRRLNRKSQRKKDIRNLLVQHEIISQKELTSLYPLSKSSMDIWDIRLDGLDRLLDRFEWARLLIHLAQRRGFKSNRKSELKDVETGKVLSSIQVNEKRLSLYRTVGEMWMKNADCSKYGKRRNSPNEYVFSVSRADLEKEIVTLFEAQRKFHSSYASVDLQKTYIQIWAHQLPFASGNAIVNKVGYCSLLKGKEKRVPKATYTFQYFNTLDQINRTRLGPNFQPFTKEQRDIILDKMFQRTDYYKKKTIPEVTYYDIRKWLALDETIQFKGLTYDPNEELKKIEMKPFINLKPFYEIKKVVTNYAKKTNEVFSALDYDTVAYALTVYKTDKDIRSYLKRSNNLSKRCYDDQLIEELLTLSYTKFGHLSFKAINHVLPIMQEGRTYQEAIHQLGYDTTNLKKENRSMFLPIIPDEITNPIVKRALTQARKVVNAIIRRYGSPNSVHIELARELSKSHDERKKIMTAHDENYKKNKGAVSILIDNGILNPTGYDIVRYKLWKEQGERCAYSLKKIPANTFFNELKKERSGPPVLEVDHILPYSQSFIDSYHNKVLVYGDENQKKGNRIPYTFFSEEDKEWESFESYVRSNSFFSKKKRGYLLKKAYLPRESNLIKERHLNDTRYASSYLKNFIEKNLKFKEAVGITRKKYVQTVNGVITAHLRKRWGLEKDRQETYLHHAMDAIIVACTDHHMVTKVTEYYQIKEGNKSIKKPYFPLPWMGFREEILSHLESQPIARKISEELKIGYQSPDYILVSRMPKRSVTGSAHDQTVMKKGDIDKKGKTIIIKRVHLKDIKFDENGDFKMVGKEQDLATYEAIKQRYLEYRKESKKAFETPLYKPSKKGKGNLIKKIKVEVQTKSFVREINGGVAQNGDLVRVDLFEKDNRYYMVPIYVVDTVRSELPNKAVTSSKGYEQWLSIDNSFTFKFSLYPYDLVRLVKGDEDRFLYFSTLDINSDRLNFKDVNKPSKQAEYRYSLKTIENLEKYEIGVLGDLRLVRQETRKIFK

SEQ ID NO: 103 - protein, 1072 aa, Bacillus sp.
  MISC_FEATURE: APG08290.1_RGN
MSELDYRIGLDIGTNSIGWGVIELFWNKDRERYEKVRIVDKGVRMFDKAEIPNKGASLAEPRRIARSSRRRLNRKSQRKKEIRNLLVQHGMITQEELDLLYPLSKKSIDIWDIRLDGLDRLLNHLEWARLLIHLAQRRGFKSNRKSELKDAETGKVLSSIQVNEKRLFLYRTVGEMWIKDAEFSKYDRRRNSPNEYVFSVSRADLEKEIVTLFEAQRKFQSSYASKNLQETYLQIWAHQLPFASGNAILNKVGYCSLLKGKERRIPKATYTFQYFSALDQVNRTRLGPDFQPFTQEQKEIILDKMFQRTDYYKKKTIPEVSYYDIRKWLELDETIQFKGLNYDPNEELKKIEKKPFINLKAFYEIKKVVANYAERTNEAFSTLDYDAIAYALTVYKTDKDIRSYLKKSNNLSKRCYDDQLIEELFTLSYTKFGHLSFKAINHVLPIMQEGRTYQEAIHQLGYDTTNLKKENRSMFLPLIPDEITNPIVKRAITQARKVVNAIIRRYGSPNSVHIELARELSKSHDERKKIMTAHDENYKKNKGAISILIENGILNPTGYDIVRYKLWKEQGERCAYSLKEIPPDTFFNELKKERNGSPILEVDHILPYSQSFIDSYHNKVLVYSDENRNKGNRIPYTYFLETNKDWEAFERYVRSNKLFSKKKREYLLKKTYLPRESELIKERHLNDTRYASTFLKNFIEQNLQFKEVEVNLRKKRVQTVNGVITAHLRKRWGLEKNRQETYLHHAMDAIIVACTDHHMVTRITEYYQIKESNKSVKKPYFPMPWEGFRDELLSHLASQPIAKKISEELKAGYQSSDYIFVSRMPKRSVTGAAHDQTIRRKGGIDKKGKTIIIKRVRLKDIKFDENGDFKMVGKEQDLATYEAIKQRYLEHRKNSKKAFETPLYKPSKKGTGNLIKRVKIEGQTKAFVREVNGGVAQNSDLVRVDLFEKDDKYYMVPIYVPDTVCSELPKKVVKSGKGYEQWLTLDNSFTFKSSLYPYDLVRLVKGNEDRFLYFGTLDIDSDRLNFKDVNKPSKQNEYRYSLKTIENLEKYEVGVLGDLRLVKQETRRIFNR

SEQ ID NO: 104 - protein, 1337 aa, Enterococcus sp.
  MISC_FEATURE: APG05459.1_RGN
MKKDYVIGLDIGTNSVGWAVMTEDYQLVKKKMPIYGNTEKKKIKKNFWGVRLFEEGHTAEDRRLKRTARRRISRRRNRLRYLQAFFEEAMTALDENFFARLQESFLVPEDKKWHRHPIFAKLEDEVAYHETYPTIYHLRKKLADSSEQADLRLIYLALAHIVKYRGHFLIEGKLSTENISVKEQFQQFMIIYNQTFVNGESRLVSAPLPESVLIEEELTEKASRTKKSEKVLQQFPQEKANGLFGQFLKLMVGNKADFKKVFGLEEEAKITYASESYEEDLEGILAKVGDEYSDVFLAAKNVYDAVELSTILADSDKKSHAKLSSSMIVRFTEHQEDLKKFKRFIRENCPDEYDNLFKNEQKDGYAGYIAHAGKVSQLKFYQYVKKIIQDIAGAEYFLEKIAQENFLRKQRTFDNGVIPHQIHLAELQAIIHRQAAYYPFLKENQEKIEQLVTFRIPYYVGPLSKGDASTFAWLKRQSEEPIRPWNLQETVDLDQSATAFIERMTNFDTYLPSEKVLPKHSLLYEKFMVFNELTKISYTDDRGIKANFSGKEKEKIFDYLFKTRRKVKKKDIIQFYRNEYNTEIVTLSGLEEDQFNASFSTYQDLLKCGLTRAELDHPDNAEKLEDIIKILTIFEDRQRIRTQLSTFKGQFSAEVLKKLERKHYTGWGRLSKKLINGIYDKESGKTILDYLIKDDGVSKHYNRNFMQLINDSQLSFKNAIQKAQSSEHEETLSETVNELAGSPAIKKGIYQSLKIVDELVAIMGYAPKRIVVEMARENQTTSTGKRRSIQRLKIVEKAMAEIGSNLLKEQPTTNEQLRDTRLFLYYMQNGKDMYTGDELSLHRLSHYDIDHIIPQSFMKDDSLDNLVLVGSTENRGKSDDVPSKEVVKDMKAYWEKLYAAGLISQRKFQRLTKGEQGGLTLEDKAHFIQRQLVETRQITKNVAGILDQRYNANSKEKKVQIITLKASLTSQFRSIFGLYKVREVNDYHHGQDAYLNCVVATTLLKVYPNLAPEFVYGEYPKFQAFKENKATAKTIIYTNLMRFFTEDEPRFMKDGEILWSNSYLKNIKKELNYHQMNIVKKVEVQKGGFSKESIKPKGPSNKLIPVKNGLDPQKYGGFDSPVVAYTVLFTHEKGKKPLIKQEILGITIMEKTRFEQNPILFLEEKGFLRPRVLMKLPKYTLYEFPEGRRRLLASAKEAQKGNQMVLPEHLLTLLYHAKQCLLPNQSESLAYVEQHQPEFQEILERVVDFAEVHTLAKSKVQQIVKLFEANQTADVKEIAASFIQLMQFNAMGAPSTFKFFQKDIERARYTSIKEIFDATIIYQSTTGLYETRRKVVD

SEQ ID NO: 105 - protein, 1436 aa, Enterococcus sp.
  MISC_FEATURE: APG04583.1_RGN
MAKNILGLDLGTNSIGWALVQQDFENKEGNILGMGSRIIPMSQDILGEFGKGNSISQTAERTGYRGVRRLRERHLLRRERLHRVLHLLGFLPKHYDEKIDFTQRFGKFINQAEPKLAFDSEFLFKDSFHEMLADFKQNQPEFLKDKNGEDCLVPYDWTIYYLRKKALTQKIEKYELAWLILNFNQKRGYYQLRGEEEKENPNKLVGFHSLKIVDVIPDAETNKKGETWYSLHLENGWVYRRSSKISLADWKDKVRDFIVTTDLNDDGSEKLDKDGIVKRSFRAPSADDWTLLKKKTEKDIDNSNKTVGTYIYDNLLLNPKQKIKGKMVRTIERKFYKQELEQILKTQKEFHSELQSENLLQDCVRELYRNNEQHQQMLEAKDFVHLFLNDIIFYQRPLRSQKSSISNCTLEFRKSKNENGEEVIHRLKVIAKSNPYYQEFRLLQWVQNLAIYTKDDDKNVTNEFLKSTQDWEDLLRWLHSKKEIKQDALIKFLIEKKGLKGKALTIEVAKYRWNYVQDKDYPGNETRYLIQSRLDKVEYAPKDFLTYENEMALWHIIYSINDKIEYEKALKSFANKKGLDEVTFVEAFKKFPPFKSDYGSFSEKAIKKLLPLMRFGTQWNWDNIDQNSKERIGKILTGEYDENIKGRVREKARHLNSETDFQALPLWLAQYVVYGRHSEADIAGKWNSVDDLKQFLDDFKQHSLRNPIVEQVITETLRAVKDIWNFYGKGAKDFFSEIHIELGREMKNTADERKRITTMVTDNENTNLRIKALLAEMALDQNVDNVRPYSPMQQEILKIYEEGVLNAEENIDDDILKISKTAQPSATDLKRYKLWLEQKYRSPYTGQMIPLNKLFTPEYEIEHIIPQSRYFDDSMSNKVICEAAVNKLKDNQIGLVFIKNHHGEVVDFGMGKQVKILEVSDYEDFVKQNYNKNRGKRNKLLLEDIPEKMIERQLNDTRYISKYITQVLSNIVRDDKEGSKDDGVNSKNIVPGNGKITTRLKQDWGLNDVWNDLVLPRFERMNTLTNSNDFTSKNTHGKTIPTVPIELSKGFSKKRIDHRHHAMDALVIACATRDHVNLLNNESSKSDTKRYDLNRKLRKYEKVAYNDPKTGERIEKEVPKDFIKPWETFTEDTRTLLENIVISFKQNLRVINKATNYYEKIENGKKVKVEQKGINWAVRKALHKETVSGQVHLDRIKVAKGKILTATRKTLDASFNEKTIESITDTGIQKILLNYLKSKDNNPEVAFSPEGIEELNKNIRLYNDGKAHQPILKVRVFEQGSKFTLGETGNKTTKFVEAAKGTNLFFGIYEDKSGKRSYETIPLNIVIERQKQGLQAVPETNEKGKQLLFTLSPNDLVYVPEEGVFDENNIKVDRIYKVVSFSTYQCFFVRNDVSTSVVNKVEYSALNKMEKSIDNIMIKENCVKLNVDRLGKISKA

SEQ ID NO: 106 - protein, 1456 aa, Enterococcus sp.
  MISC_FEATURE: APG01688.1_RGN
MMIKNILGLDLGTNSIGWALIKQDFENKHGEILGMGSRIIPMSQDILGDFGKGNSISQTADRTKYRSVRRLRERFLLRRERLHRVLHLLNFLPQHYASQIDFEKKFGKFKSETEPKLAWENWGGKFSFLFQNSFNEMLEDFKAAGQGLKIPYDWTIYYLRKKALSQKIEKEELAWILLNFNQKRGYYQLRGEEEEENPNKLVEFYSLKIVDVVADEPQKGKSDIWYSLILENGWVYRRASKIPLFDWKDKTRDFIVTTDLNDDRSVKTDKEGNEKRSFRAPSENDWTLVKKKTEQEIDQSHKTVGTYIYETLLLNPKQKIKGKLVRTIERKFYKDELKQILEKQKEFHQELKNDDLYNDCIRELYRNNEAHQLTLSKKDFVHLLMDDLIFYQRPLRSQKSSISNCTLEFRKYKDENGIEHTQYLKAIPKSNPYYQEFRLWQWMYNLNIYRKDDEANVTKEFLNTNKDFESLFEFLNNRKEIEQKPLIKFLLEQKDINKKLLNAEAEKYRWNYVEDKKYPCNETKTMISSRLDKVENISDDFLTRDIEQKIWHIIYSVNDKIEYEKALKSFATRNDLDENSFIEAFKKFSPFKSEYGSFSEKAIKKLLPLMRLGKYWYEDEIVKHSDIYFKNIENLLGDFSNRDKKISEEDKEKWNKSINLKLQEELKDFQTAEIDLFQGLRLHIAQYLVYGRHSEASMIGKWNSAEDLEEFLKDFKQHSLRNPIVEQVITETLRVVKDIWLKYGNGAKDFFNEIHIELGREMKLPADDRKKLTNQISENENTNFRIKALLAEMMNDSSVENVRPFSPMQQEILKIYEDDVLKSDIEIEDDILKISKTAQPSPSDLKRYKLWLEQKYKSPYTGQIIPLNKLFTPEYEIEHIIPQSRYFDDSFSNKVICESAVNKLKDNYIGLEFIKQFGGTIIELGFGKSIKVFETKEYEDFVKKHYANNQGKRNKLLMEDIPEKMIERQMNDTRYISKYISGVLSNIVRVEDGSDEGVNSKNIVPGNGKITTQLKQDWGLNDVWNDLILPRFERMNQLTNSKVFTAWNENYQKFLPTVPIEYSKGFSKKRIDHRHHALDALVIACATKDHVNLLNNQSAKSDTKRYDLKKKSMKFEKVVYNDAKTGEKIEREVPKQFLKPWENFTLDVKHNLETIIVSFKQNLRVINKATNYYEKYVEKDGTKNKERVEQTGTNWAIRKPMHKDTVSGKVDLPWVKVPKGKILTATRKSLDSSFDLKSIGSITDTGIQKILKNYLAFKDGNPELAFSPEGIDDLNKNIEKYNDGKPHQPINKVRVFELGSKFQVGQSGNKKDKYVEAAKGTNLFFAVYEDEKGKRNYETIPLNEVIERQKQGLSVVDLKGTNDFYLCPNDFVYIPSGDELENINNVDFKDIKKEINERIYKVVSFTGNRLSCIPYMVATTIVNKLEFTQLNKIEFTKEKEICIKLNVDRLGNISKA

SEQ ID NO: 107 - protein, 1071 aa, Bacillus sp.
  MISC_FEATURE: APG05733.1_RGN
MRELDYRIGLDIGTNSIGWGVIELSWNKDREQYEKTRIVDKGVRMFDKAEIPKTGASLAEPRRIARSSRRRLNRKSQRKKDIRNLLVQHEIISQKELTSLYPLSKSSMDIWDIRLDGLDRLLDRFEWARLLIHLAQRRGFKSNRKSELKDVETGKVLSSIQVNEKRLSLYRTVGEMWMKNADCSKYGKRRNSPNEYVFSVSRADLEKEIVTLFEAQRKFHSSYASVDLQKTYIQIWAHQLPFASGNAIVNKVGYCSLLKGKEKRVPKATYTFQYFNTLDQINRTRLGPNFQPFTKEQRDIILDKMFQRTDYYKKKTIPEVTYYDIRKWLALDETIQFKGLTYDPNEELKKIEMKPFINLKPFYEIKKVVTNYAKKTNEVFSALDYDTVAYALTVYKTDKDIRSYLKRSNNLSKRCYDDQLIEELLTLSYTKFGHLSFKAINHVLPIMQEGRTYQEAIHQLGYDTTNLKKENRSMFLPIIPDEITNPIVKRALTQARKVVNAIIRRYGSPNSVHIELARELSKSHDERKKIMTAHDENYKKNKGAISILIENGILNPTGYDIVRYKLWKEQGERCAYSLKKIPANTFFNELKKERSGPPVLEVDHILPYSQSFIDSYHNKVLVYGDENQKKGNRIPYTFFSEEDKEWESFESYVRSNSFFSKKKRGYLLKKAYLPRESNLIKERHLNDTRYASSYLKNFIEKNLKFKEAVGITRKKYVQTVNGVITAHLRKRWGLEKDRQETYLHHAMDAIIVACTDHHMVTKVTEYYQIKEGNKSIKKPYFPLPWMGFREEILSHLESQPIARKISEELKIGYQSSDYILVSRMPKRSVTGSAHDQTVMKKGGIDKKGKTIIIKRVHLKDIKFDENGDFKMVGKEQDLATYEAIKQRYLEYRKKSKKAFETPLYKPSKKGKGNLIKKIKVEVQTKSFVREINGGVAQNGDLVRVDLFEKDNRYYMVPIYVVDTVRSELPNKAVTSSKGYEQWLSIDNSFTFKFSLYPYDLVRLVKGDEDRFLYFSTLDINSDRLNFKDVNKPSKQAEYRYSLKTIENLEKYEIGVLGDLRLVRQETRKIFK

SEQ ID NO: 108 - protein, 1403 aa, Chryseobacterium sp.
  MISC_FEATURE: APG06207.1_RGN
MVERILGLDLGVSSIGWALVEEDVENPENNKIIKLGVRVNPLTIDEKTNFEKGKSITTNAGRTSARSARRNLQRFKLRRKSLWEVLINYKIIKNDTVLAEIGKNSTFQTQYLRAKAAKEKIELDELARVLFLINKKRGYKSSRKVQSDDEGKAIDGMSVAKELYEKNYTPGQYVYDLLKNGKKQIPDFYRSDLQNELDRVWEFQKQYHPDILTDEYKKELEGKGQRATAAIFLNRYKIYTADNKGTREEKRFQAYQWRVEALSQPLDIKEVAYVITEINNNLNNSSGYLGAISDRSKKLYFNGQTIGEYLYEELSLNPHARLKNQVFYRQDYQDEFEKIWETQAKFHSVLTTELKEDVRDIIIFYQRKLKSQKGLISFCEFESKEIVIEENGKKKRKKVGLKVVPKSSPLFQEFKIWQVLNNIEIKNEDGRRYLDQEEKELLFNELNCKGNLTSQKCLEFLGFKSKETKINFKVIEGNRTNEKLYDAFLKILELKGYNVFELLKIKEDRDEAKLSELKASADEIKRMVKEIFNANLINTSILDFNAELEGKDFENQASYQFWHLIYSYEGDNSPSGNEKLYELLENKFGFKKEHSKILSTIVFPQEYGSLSAKAMRRIYPYIKDNKYSEACLLAGYNHSKQSLTKEELENRKLKEQLEVLPKNSLRNPVVEKILNQMINLVNAIISEHGKLDGVRIELARELKKSAQEREDMTKSINEATILHQKYATVLRQEFGVVNPSRNDIIRYKLYMELAGNGYKDLYTNVKIEKENIFTDKYDIDHIIPQSRFFDDSFSNKVLVPRQANLDKGNLTGYDFMSNKGAEREEHFLNVIKDLLENGSISKAKYEKLKKKGIEIGDGFIERDLRDTQYIARKAKEILFEITNSVISTSGRITDKLREDWDLVNTMKELNLDKYRRLGLTEIVINSKGEEKEVIPDWTKRNDHRHHAMDALTVAFTTRNHIQYLNYLNARKDEKHKEHQNIYAIENIITEIIEKKNGSKSRRFKTPMNRFRHEAKQHLKEVLVSHKTKNKVVTSNINKTKKKRGIHKKAELTPRGQLHKETVYGSKKFLQSREEKVSAKFDYETILMVVNPIHRNALLNRLKEYGNDPKKAFSGKNAVNKTPVYLSDSKIEVLPEKVTLSWFETGYTIRKAVTPDNFKDYKNLEKITDMGIKKILKERLDQFKGNAKEAFSNLDKEPIWLNEEKGIAIKTVTITGVSNAESLHFKKDHLGKEILDENGNKIPVDFVSTGNNHHLAIYLNEEEKLDDKMVTFYEAVLRVNQGLPVIDKNYNREKGYKFLMTLKQNEMFVFPNEEFDPSEIDLLDEKNLEQISQNLFRVQKISKVGYGNSFIRDFVFRHHLETTVEDRKELRNTTYIQLKSLEGLRNIVKVRLNHLGKIVQIGEY

SEQ ID NO: 109 - protein, 1404 aa, Sphingobacterium sp.
  MISC_FEATURE: APG01647.1_RGN
MMKRILGLDLGTSSIGWAYVLEAQDENEISQIKKLGVRVNPLTTDEQLNFEKGKPITTNAGRTLARSARRNLQRYKLRRENLIEVLKREKWIDDKSILAENGNKSTFETYALRAAAASKEIKLEELARVLLMINKKRGYKSSRKVNKEDDGQLVDGMEVAKKLYHENLTPGEFVYRLLKEGKKKIPDFYRSDLQRELDLIWDFQFKYYPDLLTQDLKEELKGKGLRATSAIFWSKYKFNTAENKGTREEKKIQAYQWRKDGLTKQLEQEEVAYIIAEINGQLANSSGYLGAISDRSKELYFNKQTVGQFLFNQLQHNTHARVKNQVFYRQDYLDEFEKIWSVQSQYHQGLTEQLKEEIRDIIIFYQRKLKSQKGLISFCEFEQHEVVINGKNKIVGLRVAPKSSPIFQEFKIWQQINNVKLRNKITKEVYNLAEEQKRSLFETLNLKGKLSAYQVLNLIEVKPKEWELNYTELEGNSTNLALYNAYLDILDIEGYDVRSELKIKLNKDEITLSDLDIPVSEIKGMIRRIFQHLGINTSILDFNAQMQGDDFEKQLSYQLWHLLYSYEEDNSKTGMERLYNQLNLKFGFSLDQAKIFGKIALQEDYGNLSTKAIRKIYPYIQDVEYSVACKQAGYNHSKSSLTKEQLTNRVLKDHLDILPKNSLRNPVVEKILNQMVNVVNTLIETENDKLIKEGKNADFRFDEIRIELARELKKNAKEREELTKAINTSKSEHEKIIKILQTEDGIKNPTRNDIIRFKLYQELKNNGYKNLYTNEYIQRKDLFTNVYDIDHIIPQSRLFDDSFSNKVLVPRNINIEKGNQTAFDYVHAKFGEDGIEAYEARVERLFNLKEEGVSRSKYKKLLMRGLDIGEGFIERDLRDSQYIAKKAKAMLFEIAPSVISTSGSVTDRLREDWGLVSVMKELNLPKFKAVGLTEYLETKDGNRKEVIKDWSKRNDHRHHAMDALTVAFTKHSHIHYLNHLNARKNEKSEFFSTIKAIEIKETYVERDDLGNRKRLFKEPIPHFRSIAKEHLESVLVSHKAKNKVVTKNRNKIDGKKQAQEVLTPRGQLHKESIYGKILQYASKEEKISAKFDAATIAMVSNPRYRSALLDRLSAYGNDPKKAFTGKNSPNKSPIYLDQEKQLAVPEKVKLVWLEEDYTIRKEIGPDLKIEKVIDQGVKRILEQRLTEYGGDSKKAFSDLDNNPIWLNKEKGIAIKRVTISGVKNAEALHIKKDHLGQVLKDKDGKPMPVDFVSTGNNHHVAIYEDDNGALQERIVPFYEAVARVNNGFPIIDKHYNQHLGWKFLFSMKQNEMFLFPSEEFDPKQINLLDRSNYRLISKNLFRVQKFGELSKSGFWFRHHLETSVDVNKSLRSISYFDFYSKDFMKNIAKVRINHLGEIIHVGEY

SEQ ID NO: 110 - protein, 1453 aa, Chryseobacterium sp.
  MISC_FEATURE: APG08032.1_RGN
MMIKNILGLDLGTNSIGWALIKQDFENKYGEILGMGSRIIPMDQKVLGEFGSGNSVSQTADRTKYRGVRRLRERFLLRRERLHRVLNVLNFLPIHYASQIDFEKRFGKFREEIEPKLVYNNDGFIFKNSFEEMLSDFRKHQPQILENDKKIPYDWTIYYLRKKALTQKIEKEELAWILLNFNQKRGYYQLRGEDIEEEKDKTFVRLKVEKIVDSGDNVKGKILYDVYFDNGWKYDKQIVKTEDWIERVKEFIVTESFLKNGDIKRTYKAVDSEKDWIAIKTKTEQEIEKSHKTVGTYIYETILHNPKQKIKGKLVRTIERKFYKDELRQILEKQKEFHPELQNDDLYSDCVRELYRNNEAHQLTLSKKDFVHLFIEDIIFYQRPLRSQKSSISNCTLEYRRYKDKHGVEHIQYLKAIPKSNPYYQEFRIWQWMYNLNIYKRDDDTNVTKEFLNSTEDFENLFDFLNNRKEVEQKALLKHFKLNEKTHRWNFVENKKYPCNETKTMISSRLDKVENISENFLTSEIEHKIWHIIYSVNDKIEYEKALKSFANKNNLDEVSFFEAFKKFPPFKNEYGSFSEKAIKKLLPLMRVGKYWDEDEIVKNSDTYFKNIEDLLGNIARKEENISDDDRKKYNKTVNLKLREELEIFQDAEIASFQKLRLHIAQYLVYGRHSEASIIGKWNSADDLEEFLKEFKQHSLRNPIVEQVITETLRVVKDIWMKYGNGAKDFFNEIHIELGREMKLPAEDRKKLTSQISENENTNLRIKALLAEMMNDSSVENVRPFSPMQQEILKIYEDGVLNSGIEIEDEYLKISKTAQPSSSDLKRYKLWLEQKYKSPYTGQIIPLNKLFTPEYEIEHIIPKSRYFDDSFSNKIICESAVNKLKDNYIGLGFIKQFAGAIVELGFGKNVKVFEIEEYEDFVKKHYANNRGKRNKLLLEEIPEKMIERQLNDTRHISKYISSVLSNIVRVEDGTDEGVNSKNIVPGNGKITIQLKQDWGLNDVWNDLILPRFERMNQLTNSTDFTAWNKNHQKYLPTVPIEFSKGFSKKRIDHRHHALDALVIACTTKDHVNLLNNQSAKSDTKRYDLKKKLMKFEKVVYNHTQTGEKIERDIPKQFLKPWETFTIDAKNRLETIIVSFKQNLRVINKATNHYEKYVEKEGVKMKERVEQTGTNWAIRKSLHEETVSGKITLSWVETSKGEFITATRKPLDSSFTFEKINKITDTGIQKILNNYLEAKDNNPELAFSAEGIEDLNKNIEKYNDGKSHQPIIKIRLYEKGKGRFVLGQTGNKINKYVQGSPNLFFAIYKDENGKKIFESIRLDIVIERLKQGLQAIPETNQNGVSLYQSLSPLDLVYIPTEYELESPHILDFSKLNKTQITRLYNTNDFSGVTAYFSQNSFAKHIYPKEMDLSWNEKKQKLSGSFDSKTASYNNTSIKDIFIKVKVDRLGNISKA

SEQ ID NO: 111 - protein, 1093 aa, Brucella sp.
  MISC_FEATURE: APG05712.1_RGN
MKTLGIDLGTASIGWAILDEASIIASGVRIFSQSEMAGRDPQSKASLAVARRDARGARRRRDRYLKRRRRLLDLLTEHGLAPADEKSRKALVREYEDGKDGDLSNSVYALRARALDEALTPYEIGRAIFQLNQRRGFKSNRKTDSNDPEQGKIATAIHVLDAKMDEDKARTFGEWLHMRRLKGLSVRARMTADGDSYDFYPSRAALEREFDRLMASQKRFHPDLLNSSVIDDIRKVVFHQRPLKPVQPGKCSYNHRESRLPKAHPLFQKFRLLKEVNELEIVGEDQRYVKLTPAQRDVLTLALRTGLTKQGRLPFSKLRSILKLGKEVRFNKEKDNRTDLEGDVIHFRVSRPDCFGNRWAAMPVEEQAAVTEKLRTEPDYSALLDWLKNEAGLDEAHARAVADTPVPDGFGRMGPSALSALADAMEHEIDAQGFVITEAEAAKRVYGRTNSEADPGRKGVDQLPKYQEVLQRHIPPGTGEPDDPYDEYMGRITNPTVHIALNQLRRLVNALIRKYGKPNKIAIEVGRELKLNEKQRNEVNREIGQNTRAAMARGQQLVEIFKQPNTGYNRLRLELWEDLNREQPLKRLCTYCGKAIAAHMLFNGETDIDHILPYSKTLDDSKANRLLCCTPCNREKKNYAPANVLQWRDHYGEILARATALPKNKQWRFAEDAMTRYEAEGGFLARQLTDMQYISRLALTYLAHLYDYEEPDLDGVYKRHDRVRALPGRMTEMLRRQWALNELLHGHNLAGGDGAKEKNRLDHRHHAIDAIVIACTSQSLINRLSTAAGEAEERGAARVVERIDPPWPSFREDVREAVNAIVVSHKPDHGTASRSGYDKGRGQTAGKLHNDTAYGETGEKDHNGNNLVVRRIAISDIKRSADIMKIRTNAHGHSELRDRLYEATRDLEGKAFEQAVTAFVKHDAKFKGIRHVRVTEVQNPVWITHGGGKYKKGYLPGGNDRFDVWELPDGKWDAEVVTTFDAHRPDFTPRMRIEHHNARKIMSLKKGDMIAYDDPDSGKRVIAIVRKFDQRNKQLYLDPHNEAGNLDQREKEKTYKPLRPMPNPLKKYRPRQVRVDEIGQVFDPGPWWEKRSD

SEQ ID NO: 112 - protein, 1054 aa, Staphylococcus sp.
  MISC_FEATURE: APG01658.1_RGN
MKEKYILGLDLGITSVGYGIINFETKKIIDAGVRLFPEANVDNNEGRRSKRGSRRLKRRRIHRLERVKLLLTEYDLINKEQIPTSNNPYQIRVKGLSEILSKDELAIALLHLAKRRGIHNINVSSEDEDASNELSTKEQINRNNKLLKDKYVCEVQLQRLKEGQIRGEKNRFKTTDILKEIDQLLKVQKDYHNLDIDFINQYKEIVETRREYFEGPGQGSPFGWNGDLKKWYEMLMGHCTYFPQELRSVKYAYSADLFNALNDLNNLIIQRDNSEKLEYHEKYHIIENVFKQKKKPTLKQIAKEIGVNPEDIKGYRITKSGTPQFTEFKLYHDLKSIVFDKSILENEAILDQIAEILTIYQDEQSIKEELNKLPEILNEQDKAEIAKLIGYNGTHRLSLKCIHLINEELWQTSRNQMEIFNYLNIKPNKVDLSEQNKIPKDMVNDFILSPVVKRTFIQSINVINKVIEKYGIPEDIIIELARENNSDDRKKFINNLQKKNEATRKRINEIIGQTGNQNAKRIVEKIRLHDQQEGKCLYSLESIALMDLLNNPQNYEVDHIIPRSVAFDNSIHNKVLVKQIENSKKGNRTPYQYLNSSDAKLSYNQFKQHILNLSKSKDRISKKKKDYLLEERDINKFEVQKEFINRNLVDTRYATRELTSYLKAYFSANNMDVKVKTINGSFTNHLRKVWRFDKYRNHGYKHHAEDALIIANADFLFKENKKLQNANKILEKPTIENNTKKVTVEKEEDYNNVFETPKLVEDIKQYRDYKFSHRVDKKPNRQLINDTLYSTRMKDEHDYIVQTITDIYGKDNTNLKKQFNKNPEKFLMYQNDPKTFEKLSIIMKQYSDEKNPLAKYYEETGEYLTKYSKKNNGPIVKKIKLLGNKVGNHLDVTNKYENSTKKLVKLSIKNYRFDVYLTEKGYKFVTIAYLNVFKKDNYYYIPKDKYQELKEKKKIKDTDQFIASFYKNDLIKLNGDLYKIIGVNSDDRNIIELDYYDIKYKDYCEINNIKGEPRIKKTIGKKTESIEKFTTDVLGNLYLHSTEKAPQLIFKRGL

SEQ ID NO: 113 - protein, 1076 aa, Bacillus sp.
  MISC_FEATURE: APG06498.1_RGN
MSELDYRIGLDIGTNSIGWGVIELFWNKDRERYEKVRIVDKGVRMFDKAEIPKTGASLAEPRRIARSSRRRLNRKSQRKKEIRNLLVQHGVITQEELDLLYPLSKKSMDIWDIRLDGLDRLLNHLEWTRLLIHLAQRRGFKSNRKSELKDAETGKVLSSIQVNEKRLSLYRTVGEMWIKDAEFSKYDRRRNSPNEYVFSVSRADLEKEIVTLFEAQRKFQSSYSSKNLQETYLQIWAHQLPFASGNAILNKVGYCSLLKGKERRIPKATYTFQYFSALDQVNRTRLGPDFQPFTQEQKEIILDKMFQRTDYYKKKTIPEVSYYDIRKWLELDETIQFKGLNYDPNEELKKIEKKPFINLKAFYEIKKVVANYAERTNEAFSTLDYDAIAYALTVYKTDKDIRSYLKKSNNLSKRCYDDQLIEELFTLSYTKFGHLSFKAINRVLPIMQEGRTYQEAIQQLGYDTTNLKKENRSMFLPLIPDEITNPIVKRALTQARKVVNAIIRRYGSPNSVHIELARELSKSHDERKKIMTAHDENYKKNKGAISILIENGILNPTGYDIVRYKLWKEQGERCAYSLKEIPPDTFFNELKKERNGSSILEVDHILPYSQSFIDSYHNKVLVYSDENRNKGNRIPYTYFLETNKDWEAFERYVRSNKLFSKKKREYLLKKAYLPRESELIKERHLNDTRYASTFLKNFIEQNLQFKEVEVNLRKKRVQTVNGVITAHLRKRWGLEKNRQETYLHHAMDAIIVACTDHHMVTRITEYYQIKESNKSVKKPYFPMPWEGFRDELLSHLASQPIAKKISEELKAGYQSSDYIFVSRMPKRSVTGAAHNQMIRRKGGIDKKGKTIIIKRVRLKDIKFDENGDFKMVGKEQDLATYEAIKQRYLDHGKNLKKAFETPLYKPSKKGTGNLIKRVKIEGQTKAFVREVNGGVAQNSDLVRVDLFEKDDKYYMVPIYVPDTVCSELPKKVVKSGKGYEQWLTLDNSFTFKFSLYPYDLVRLVKGDEDRFLYFGTLDIDSDRLNFKDVNKPSKQNEYRYSLKTIEDLEKYEVGVLGDLRLVRKETRRNFHEIKIN

SEQ ID NO: 114 - protein, 1108 aa, Brevibacillus sp.
  MISC_FEATURE: APG09106.1_RNG
MAIRSIKLKLKTRTGPEAQNLRKGIWRTHRLLNEGVAYYMKMLLLFRQESTGGQTKKELQEELVRHIREQQQKNRADKNTQALPLDKAFAALRQLYELLVPSSIGQSGDAQIISRKFLSPLVDPNSEGGKGTSKAGAKPTWQKKKEANDPTWEQDYEKWKKRREEDPTASVITTLEEYGIRPIFPLYTNTVADIAWLPLQSNQFVRTWDRDMLQQAIERLLSWESWNKRVQEEYSKLQEKMTQLNEQLEGGQEWISLLEQYEEQREQELIENMTAANDKYRITKRQMKGWNELYEQWSTVLPNASHEQYREALKRVQQRLRGRFGDAHFFQYLMKEEHHLIWKGNPQRIHYFVARNELKKRLEEAKQNATMTLPDARKHPLWVRFDARGGNLQDYYLTAEADNPRSRRFVTFSQLIWPNESGWMEKQDVEVELALSKQFYQQVTLQKNDKGKQEIEFKDKGSGSTFSGHLGGAKLQLERGDLEKEEKDFEGGEIGSVYLNIVIDFEPLQEVKNGRLQSPYGQVLQLVRRPNEFPKVTTYKSEELVEWMKASQNHSSGVESLESGFRVMSIDLGLRTAAATSIFSVEESNDANAAGFSYWIEGTPLVAVHKRSYMLKLPGEQVEKQVREKRDERQDQQRRVRFQIRILSQVIRMAKKQNRERADELDHLSQALEKQKSLLDQTDRTFWNGIVCDLTDALREKEGGWEQAVVQIHRKAEEHVGKVVQAWRKRFDADERKGIAGLSMWSIEELDSLRKLLISWSRRTRNPQEINRFEQGHTSHQRLLTHIQNVKEDRLKQLSHAIVMTALGYVYDEKKLEWFAKYPACQVILFENLSQYRSHMDRSTKENSTLMKWAHRSIPKYVHMQAEPYGIQIGDVRAEYSSRFHAKTGTPGIRCKMVKGQELQGKRFENLQKRLVSEQFLTEEQVKQLRPGDIVPDDSGEWFMTLSDGSEGKEVVFLQADINAAQNLQKRFWQRYNELFKVSCRVLIRGEEEYLIPKAKSVQAKLGKGLFVKKTDTVMKDVYVWDSQAKLKGKTTFTEESESPEQLEDFQEIIEEAEEAKGTYRTLFRDPSGVFFPEFVWNTQKDFWSEVKRRLYGKLRERFLMKTR

SEQ ID NO: 115 - protein, 1150 aa, Enterococcus sp.
  MISC_FEATURE: APG09882.1_RGN
MYSIGLDLGISSVGWSVIDERTGNVIDLGIRLFSAKNSEKNLERRTNRGGRRLIRRKTNRLKDAKKILAAVGFYEDKSLKNSCPYQLRVKGLTEPLSKGEIYKVTLHILKKRGISYLDEDDTEAAKESQDYKEQVRENAQLLTKYTPGQIQLQRLKENNRVKTGINAQGNYQLNVFKVSAYANELATILKTQQAFYPNELTDDWIALFVQPGIAEEAGLIYRKRPYYHGPGNEANNSPYGRWSDFKKTGQPATNIFDKLIGKDFQGELRASGLSLSAQQYNLLNDLTNLKIDGEIPLSPEQKEYILAELMTKEFTRFGVNDVVKLLGVKKERLSGWRLDKKGKPEIHTLKGYRNWRKIFAESGIDLATLPTETIDCLAKVLTLNTEREGIENTLAFELSELAESVKLLVLDRYKELSQSVSTQAWHRFSLKTLHLLIPELMNATSEQNTLLEQFQLKSDVRKRYSEYKKLPTKDVLTEIYNPTVNKTVSQAFKVIDALLVKYGKEQIRYITIEMPRDDNEEDEKKRIKELHAKNSQRKNDSQSYFMQKSGWSQEKFQTTIQKNRRFLAKLLYYYEQDGICAYTGLSISPELLVSDSTEIDHIIPISISLDDSINNKVLVLSKANQVKGQQTPYDAWMDGSFKKINGKFSNWDDYQKWVESCHFSHKKENNLLETRNIFDSEQVEKFLARNLNDTRYASRLVLNTLQSFFANQETKVRVVNGSFTHTLRKKWGADLDKTRETHHHHAVDATLCAVTPFVKVSRYHYAVKEETGEKVMREIDFETGEIVDEMSYREFKKSKKYERKTYQVKWPNFREQLKPVNLHPRIKFSHQVDRKANRKLSDATIYSVREKTEVKTLKSGKQKITTDEYTIGKIKDIYTVDGWEAFKKKQDKLLMKDLDEKTYERLLSIAETTPDFQEVEEKNGKVKRVKRSPFAVYCEENDIPAIRKYAKKNNGPLIRSLKYYDGKLNKHINITKDSQGRPVEKTKNGRKVTLQSLKPYRYDIYQDLETKAYYTVQLYYSDLRFVEGKYGITEKEYMKKVAEQTKGQVVRFCFSLQKNDGLEIEWKDSQCYDVRFYNFQSANSINFKGLEQEMMPAENQFKQKPYNNGAINLNIAKYGKEGKKLRKFNTDILGKKHYLYYEKEPKNIIK

SEQ ID NO: 116 - protein, 1408 aa, Sphingobacterium sp.
  MISC_FEATURE: APG02675.1_RGN
MKRILGLDLGTSSIGWAYVLEAQDENEISKIEKLGVRVNPLTTDEQLNFEKGKPITTNAGRTLARSARRNLQRFKLRRNNLIEVLKREKWIDDKSILAENGNKSTFETYALRAAAASKEIKLEELARVLLMINKKRGYKSSRKVIKEDDGQLVDGMEVAKKLYHENLTPGEFVCRLLKEGKKKLPDFYRSDLQRELDLIWDFQFKYYPELLTRDFKEELKGKGLRATSAIFWSKYKFNTAENKGTKEEKKIQAYQWRKDGLTKQLAKEEVAYIIAEINGQLANSSGYLGAISDRSKELYFNKQTVGQFLFNQLQQNTHARLKNQVFYRQDYLDEFEKIWCIQSQFHQALTEQLKEEIRDIIIFYQRKLKSQKGLISFCEFEQHEVVVNGKNKVVGLRVAPKSSPIFQEFKIWQQLNNVKLRNNITKEVYNLAEEQKKLLFETLNLKGKLSAYQVLSLIEGKPKEWELNYTELEGNSTNSALYNAYLNILDIEGYDVRSELKIKLNKDEITLSDLDIPVSEIKDMIRRIFQHLGINTSILDFDAQMQGDDFEKQLSYQLWHLLYSYEEDDSKTGMDRLYNQLNLKFGFSLDQAKFIGKIALQDDYGNLSTKAIRQIYPYIQDAEYSAACKLAGYNHSKSSLTKEQLTNRVLKDHLDILPKNSLRNPVVEKILNQMVNVVNTLIDTENDKLIKEGKNADFRFDEIRIELARELKKNAKEREELTKAINTSKEQHEKIIKILQTEDGIKNPTRNDIIRFKLYQELKNNGYKNLYTNEYIQRKDLFTNIYDIDHIVPQSRLFDDSFSNKVLVPRNINIEKGNQTAFDYVRTKFGEDGIEAYEARVERLFNLKEEGVSRSKYKKLLMRGSDIGEGFIERDLRDSQYIAKKAKAMLFEITPSVISTSGSVTDRLREDWGLVSVMKELNLPKFKAVGLTEYLETKDGNRKEVIKDWSKRNDHRHHAMDALTVAFTKHSHIQYLNHLNARKNEKSEFFSSIKAIEIKETYVERDDLGNRKRLFKEPIAHFRTIVKEHLERVLVSHKAKNKVVTKNRNKIDGKKEAQEVLTPRGQLHKETIYGKILQYASKEEKISAKFDAATIAMVSNPRYRSALLDRLIEYGNDPKKAFTGKNSPSKSPIYLDQQRQLAVPEKVKLVWLEADYTIRKEIGPDLKIEKVIDQGVKRILKQRLSVYDGDTKKAFSDLDNNPIWLNEEKGIAIKRVTISGVKNAEALHTKKDHLGQVLEDKDGNTMPVDFVSTGNNHHVAIYEDSEGNLYDRVVSFYEAVERINQNLPIVDRHYKQEEGWKFLFSMKQNELFVFPSINFDPKEIDLLDKKNYKEVSKHLFRMQKFSKVEYGNSAVRDYVFRHHLETSIIDTKELRDIAYKVFKSIGEFKSFVKIRTNHLGEIVHLGEY

SEQ ID NO: 117 - protein, 1369 aa, Chryseobacterium sp.
  MISC_FEATURE: APG01405.1_RGN
ARTDYRGIRRLRERFLLRRERLHRILNVLNFLPEHYASQIDFDKRFGKFKVETEPKLAWKNSDGKFSFLFQTSFNEMLEDFKAHGQDLKVPYDWTIYYLRKKALSQKIEKEELAWILLNFNQKRGYYQLRGEEEEENPNKLIEFYSLKIIDVLADEPQKGKSDIWYSLVLENGWIYRRSSKTSLLDWKDKIRDFIVTTDLNDNGSVKTDKEGNEKRSFRAPGENDWTLVKTKTEQEIDRSRKTVGTYIYETLLQNPKQKIKGKLVRTIERKFYKEELKQILEKQKEFHYELQSDDLYDDCIRELYRNNEAHQLTLSKKDFVHLFMEDIIFYQRPLKSQKSSISNCTLEFRKYKDENGVEHTQFLKAIPKSNPYYQEFRIWQWIFNLNIYKKDNDDNVTKEFLSTTEDFENLFEFLNNRKEIDQKALLKHFKLNEKTHRWKYVEDKKYPCNETKTMISERLKKVENISDDFLTRGMEQKIWHIIYSVNDKTEYEKALKSFAEKNNLDENSFFEAFRKFPPFKSEYGSFSEKAIKKLLPLMRLGKYWSYANIDLYSKNRIQKIITGEFDENIKDRVREKAIHLTAENDFQGLQLWLAQYIVYGRHSEATMIGKWNSADDLEEFLKEFKQHSLRNPIVEQVITETLRVVKDIWLKYGNGAKDFFNEVHIELGREMKQTKDERANATKTITENENTNLRIKALLAEMMNDHSVENVRPYSPMQQEILKIYEDGILKSDIEIDDDILKISKTAQPSSSDLKRYKLWLEQKYKSPYTGQIIPLNKLFTPEYEIEHIIPQSRYFDDSLSNKIICESAVNKLKDNYIGLGFIKQFGGTIIECGFGKRVKVFKAEEYEEFVKKHYANNRGKRNKLLLEDIPEKMIERQMNDTRHISKYISGILSHIVRVEDGTDEGVNSKNVIPGNGKITTQLRQDWGLNDVWNELVLPRFERMNQLTNSTDFTSWNENHQKYLPTVPVEFSKGFSKKRIDHRHHALDALVIACATKDHVNLLNNQSAKSDTKRYDLKKKLMKFEKTVYKDPQTEKRIEREVPKYFLKPWETFTVDAKNKLETIIVSFKQNLRVINKATNYYEKYVDKDGVKTKERVEQTGTNWAIRKPMHKETVSGKIDLPWVKVPKGKILTATRKSLDTSFDLKAIASITDTGIQKILKNYLEFKESPELAFSPEGIEDMNKNIKKYNGGKPHQPISKVRVFELGSKFQVGQTGNKKDKYVEAAKGTNLFFAIYEDRKGKRSYETIPLNEVIERQKQGLSVVDLKNINDFFLCPNDLVYIPSGDELENGGSIEIKNITKEKSERFYKVVSFSGSQIFFVRHDIAVSIVNKGEFSTLNKMERAIDGSMVKESCIKLKIDRLGNVLKA

SEQ ID NO: 118 - protein, 1440 aa, Chryseobacterium sp.
  MISC_FEATURE: APG06250.1_RGN
MKNILGLDLGTNSIGWALVKQDFKNKQGEILGMGTRIIPMSQDILGDFGKGNSVSQTAERTKYRSARRLRERFLLRRERLHRVLNILNFLPEHYASQIDFEKRFGKFKVETEPKLAWKNIEGQFSFLFQNSFNEMLEDFKANAQDLRIPYDWTIYYLRKKALSQKIEKEELVWILLNFNQKRGYYQLRGEEEEENPNKLVELYSLKVVDVFVDEPQKGKSDIWYSLVLENGWIYRRASKISLFDWKDKIRDFIVTTDLNDDGSVKTDKDGNEKRSFRAPGENDWTLVKKKTEQEIEQSHKTVGMYIYETLRANPKQKIKGKLVRTIERKFYKEELRQILEKQKEFHQELQNDDLYNDCIRELYRNNEAHQLTLSKKDFVHLFIEDIVFYQRPLRSQKSSISNCTLEFRKYKDENGAEHTQYLKAIPKSNPYYQEFRLWQWIFNLNLYKKDNDENVIKEFLTTTQDVENLFEFLNNRKEIDQKALLKHFKLSEKTHRWNFVEDKKYPCNETKTMIATRLEKVENISDDFLTREIEQKIWHIIYSVNDKIEYEKALKSFALKHNLDENSFFEAFRKFPPFKSEYGSFSEKAIKKLLPLMRLGKYWDYANIDQFSKGRIQKIINGEYDENIKDRVREKAVHLTSENDFQGLQLWLAQYIVYGRHSEASIAGKWNSADDLEEFLKDFKHHSLRNPIVEQVITETLRVVKDIWLKYGKGAKDFFNEIHIELGREMKLPADDRKKLTNQITENENTNLRIKALLAEMMNDHGVENVRPFSPQQQEILKIYEDGVLNSDIEIEDEYLKISKTAQPSPSDLKRYKLWLEQKYKSPYTGQIIPLNKLFTPEYEIEHIIPQSRYFDDSFSNKIICESAVNKLKDNYIGLGFIKQFGGTIIELGFGKSVKVFDIDEYEDFVKKHYANNRSKRNKLLLEDIPEKMIERQINDTRYISKYISGILSNIVRLEDGSDEGINSKNIVPGNGKITTQLKKDWGLNDVWNDLILPRFKRMNQLTNSTDFIAWNENFQKFLPTVPIEYSKGFSKKRIDHRHHALDALVIACATKDHVNLLNNQSAKSETKRYDLKKKLMKFERVVYLHTQTGEKIEREVPKHFLKPWENFTVDVKHNLDTVIVSFKQNLRVINKATNYYEKYAENGGARNKARVEQKGINWAIRKPMHKDTVSGKVDLPWVKVPKGKILTATRKSLDTSFDLKSIGSITDTGIQKILKNYLMLKDGNPELAFSPEGIEDLNKSIEKYNDGKPHQPINKVRVFELGSKFQIGQAGNKKDKYVEAAKGTNLFFAVYEDKNGKRSYETIPLNEVIERQKQGLPVVDLRSTNDFYLCPNDLVYILSDDERGNMTNNDFENLSDEQVKRIYKFVSCTGGEGHFIPYANATEIIKNENGTNSKSERMQNFYDGSCMLDKNSKPIMIKENCVKLKVDRLGNISKI

SEQ ID NO: 119 - protein, 1071 aa, Bacillus sp.
  MISC_FEATURE: APG06877.1_RGN
MRELDYRIGLDIGTNSIGWGVIELSWNKDREQYEKTRIVDKGVRMFDKAEIPKTGASLAEPRRIARSSRRRLNRKSQRKKDIRNLLVQHEIISQKELTSLYPLSKSSMDIWDIRLDGLDRLLDRFEWARLLIHLAQRRGFKSNRKSELKDVETGKVLSSIQVNEKRLSLYRTVGEMWMKNADFSKYGKRRNSPNEYVFSVSRADLEKEIVTLFEAQRKFHSSYASVDLQKTYIQIWAHQLPFASGNAIVNKVGYCSLLKGKEKRVPKATYTFQYFNTLDQINRTRLGPNFQPFTKEQRDIILDKMFQRTDYYKKKTIPEVTYYDIRKWLALDETIQFKGLTYDPNEELKKIEMKPFINLKPFYEIKKVVTNYAKKTNEVFSALDYDTVAYALTVYKTDKDIRSYLKRSNNLSKRCYDDQLIEELLTLSYTKFGHLSFKAINHVLPIMQEGRTYQEAIHQLGYDTTNLKKENRSMFLPIIPDEITNPIVKRALTQARKVVNAIIRRYGSPNSVHIELARELSKSHDERKKIMTAHDENYKKNKGAISILIENGILNPTGYDIVRYKLWKEQGERCAYSLKKISANTFFNELKKERSGPPVLEVDHILPYSQSFIDSYHNKVLVYGDENQKKGNRIPYTFFSEEDKEWESFESYVRSNSFFSKKKRGYLLKKAYLPRESNLIKERHLNDTRYASSYLKNFIEKNLKFKEAVGITRKKYVQTVNGVITAHLRKRWGLEKDRQETYLHHAMDAIIVACTDHHMVTKVTEYYQIKEGNKSIKKPYFPLPWMGFREEILSHLESQPIARKISEELKIGYQSSDYILVSRMPKRSVTGSAHDQTVMKKGGIDKKGKTIIIKRVHLKDIKFDENGDFKMVGKEQDLATYEAIKQRYLEYRKESKKAFETPLYKPSKKGKGNLIKKIKVEVQTKSFVREINGGVAQNGDLVRVDLFEKDNRYYMVPIYVVDTVRSELPNKAVTSSKGYEQWLSIDNSFTFKFSLYPYDLVRLVKGDEDRFLYFSTLDINSDRLNFKDVNKPSKQAEYRYSLKTIENLEKYEIGVLGDLRLVRQETRKIFK

SEQ ID NO: 120 - protein, 1091 aa, Rhizobium sp.
  MISC_FEATURE: APG09053.1_RGN
MDIETLFAFDIGTNSIGFCVFALDENGEPYRIIDIGTRIYADGRDPQSKASLAVARREARAMSRRRDRYVNRRKAVLRTLTEYGLMPAEASARQALIAETSDRNGAAGEASANPYALRAMALDEKLPLYWIGRVLFHLNQRRGFKSNRKTDRKDNEKGVIALGIGELRAAMHKTKARTYGEWLAARREDGHVTRLRAGSDAFEGDGYAFYPERSLLEAEFREIWARQSSFYPDVLTEARGDHLFQVMFYQRPLKKPRVGKCAFNPLEERLAKAHPLFQEFRLYKEVNELELVLPDHSHKKLDIEQRNALVILLRANREVTFKKLRTALKLAPDIVFNKESESREKLRGDEVHSVLADKKRFGPQWGALSRERQWQIIQTLKDEENPEKLFGWLKEEFGFEGEKADAIANAPLPEGYGRLGETALSSMLDEMKAAVIPEAEAAKNCGYDHSKLGEDREEGEAFLPPYQEILSRQIPPGTNDPADIYDIRMGRFTNPTVHIGLNQLRRVVNALIARHGKPQFVSLELARDLQLSEKQKAEANRAIAKNTREAAARSKKLGEMGQLDTGYNRLLLKLWEELNPSKPEDRVCIYSGKPIGIDMLFSAEVDVDHILPWSKTLDDSQANKLLCLKSANRQKRNRAPADVPEWRDRYEEILARAARLAPNKRRRFAPNAMAEFEAEGGFLARQLTDTQYLSRMAREYLSCLFPSAEIDRRGERKKKIRVIVSPGRLTEMLRRNWGLNNILPDHNLGEMTQAKNRKDHRHHAIDAAVVGVTTRSLLQRIATAAGRLDEADFENLVRKMVSENPPWPTFREELQAAVNGIVVSHKPDHGTVSRKGYAEGKGRTAGRLHNDTAYGFGTDASGNPVAVRRKLFTSLEAKDIPMIRDPELQAELYAAIDGLDDRRALQDALLSFRRTHPKFKGIRRVRMAETLSFIPIRDSQGNVYKGYKGDANYRYDVWETLDGKWHADVVTMFNAHQPDWRSPVHQEHPTARRVLRLQQNDMVAYEHPNDGYTIARVVKFNTAGIVYFASHRESGSLKARDADKQDPFKYFSKSAAGLKDIQCRQIRIDAAGRVFDPGPQDRASKSTRKTN

SEQ ID NO: 121 - protein, 1401 aa, Myroides sp.
  MISC_FEATURE: APG04293.1_RGN
MKRILGIDLGTTSIGWAYVHEAENENEISSIEKLGVRVNPLTVDEQINFEKGKPITTNATRTLFRSARRNLQRFKLRRKHLIEILKHNNWISKQTLLTENGNHTTFETISLRDKAATQKVTLEELARVLLMINKKRGYKSSRKVNNTEEGQLIDGMEVAKKLYHEQLTPGQLSLQLIKQGVKRLPDYYRSDLNHELDLIWAFQQKFYPHILTSEFKELLKGKGLRATSNQFWTNYNFNTADNKGTREEKKLQNYQWRSDALIKQLDKEIVAYVISEINGQINNSSGYLGAISDRSKELYFNQLTVGQYLHRQLIANPHTRLKSQVFYRQDYLDEFEKIWETQSKFYPKELTTVLKNEIRDTVIFYQRKLKSQKGLISFCEFEQEQKIINGKTKTIGHRVIPKSSPLFQEFKIWQQLHNVVLRNKKTNVITPLAEEQKSHLFEELNLKGKLSSTQILKLIEDKPKDWELNYSELEGNNTNKALYNAYLDILDLEGYDIRDELKIKLNKDDIELSDLDVNASEIKEMIFSIFKHLGINTEILEFDATLKDKAFEKQASYQLWHLLYSYEEDNSPTGLDRLHNLLQKKFNFTLDQAKLVGNVLFQDDYGNLSSKAIKNIFPYITDNNYSTACELAGYKHSKHSLTKEENEKRELKSRLTILTKNSLRNPVVEKILNQMINVINTLIESENDKLVAQGKEPNFQFDEIRIELARELKKNAKEREELTKSMTQGKTNHEKIIKILQKEDGIKNPTRNDITRFKLYSELKNNGYKDLYTNEYIERKDIFSKEYDIEHIIPQSKLFDDSFSNKTLVRRNVNLKKGNQTAYDFILSEYGQEKANEFETRITNLYSLGKDEGISKSKYKKLLMQESEIGKGFIERDLRETQYIAKKAKSLLLEITRNVVSTSGGITDRLREDWGLVNVMKELNLKKFRDAGLTEFVEMKDGNKKEVIIDWTKRNDHRHHAMDALTIAFTKHNHIQYLNHLNARKNTKDELHTNIIAIEKKETTIITDERGNKKRIFKEPIPNFRNIAKSHLEAILVSHKAKNKVVTKNINKISGKKIGQQTLTPRGQLHKETVYGKIRQYVSKEEKVGPKFTKEVIELVSNPTYRDLLLKRLQENNNDPKKAFGGKNALSKSPIYINLEKNIIVPEVVKLVWLEDDYTIRKEISPELKIDKVVDEGVKRILQNRLALYNGDAKIAFSDLDNNPIWLSKDKGITIKRVTLSGVKNATALHTKKDHLGQPILDHKGQEIPVDFISTGNNHHVAIYEDKNGKLQESVVSHFEAVERVNQQLPIIDKTFNQHLGWKFLFTMKQNELFLFPSDDFNPNEIDLFDTRNYAVISKHLFRAQKLSTKDYSFRHHLETNVEDIKDLKTITWRREGLNGIQNIVKIRTNHLGEIVHIGEY

SEQ ID NO: 122 - protein, 1432 aa, Chryseobacterium sp.
  MISC_FEATURE: APG01308.1_RGN
MAKNILGLDLGTNSIGWALINQDFENKQGKILGMGSRIIPMSQDILGDFGKGNSVSQTAARTGYRGVRRLRERFLLRRERLHRVLNIINFLPEHYASQIDFEKRFGKFKEETEPKLAYNKDGFVFKDSFEEMLADFKNYQPQLLENDKKIPYDWTIYYLRKKALSQKIEKEELAWILLNFNQKRGYYQLRGEDFEEEKDKMFVRLKVEKIIDSGDNVKGKILYDVYFENGWKYDKQIVKTEDWIERVKEFIVTESFLKNGDIKRTFKAVDSEKDWIAIKTKTEQEIDKSHKTVGVYIYETLLQNPKQKIKGKLVRTIERKFYKDELKQILEKQKEFHQELKNDDLYNDCVRELYRNNEAHQLTLSKKEFVHLLMEDIIFYQRPLRSQKSSISNCSLEFRKYKDENGVEHIQYLKAVPKSNPYYQEFRIWQWIFNLNIYKRDDEQNPVTTEFLNTTTDIENLFEFLNNRKEVDQKALLKHFKLNEKTHRWKYVEDKKYPCNETKSMISERLKKVENIANDFLTREIEQKIWHIIYSVNDKIEYEKALKSFAKKNNLDENSFFEAFKKFPPFKSEYGSFSEKAIKKLLPLMRLGKYWNCENISDDSKERIQKIINGEYDENIKDRVREKAIHLTSENNFQGLQLWLAQYVVYDRHSEASMIGKWNSADDLEEFLKEFKQHSLRNPIVEQVITETLRVVKDIWLKYGNGAKDFFNEIHIELGREMKQTKDERLDATKRITENENTNLRIKALLAEMMNDNSVENVRPYSPMQQEILKIYEDGVLNSGIEIEDEYLKISKTAQPSPSDLKRYKLWLEQRYKSPYTGQIIPLNKLFTPEYEIEHIIPQSRYFDDSFSNKIICESAVNKLKDNYIGLGFIKQFGGTIVECGLGKNVKVFEVNEYEDFVKKHYANNRGKRNKLLLEEIPEKMIERQLNDTRHISKYISGVLSNIVRVEDGSDEGVNSKNIVPGNGKITTQLKQDWGLNDVWNDLILPRFERMNQLTNSTDFTAWNENHQKFLPTVPIEFSKGFSKKRIDHRHHALDALVIACATKDHINLLNNQSAKSDTKRYDLKKKLMKFEKGVYNHPQTGERIQRDVPKQFLKPWESFTIDAKNNLDKIIISFKQNLRVINKATNYYEKYVEKNGIKTKERVEQTGTNWAIRKPMHKETVSGIVNLPWVKVPKGKILTATRKSLDTTFDLKSINSITDTGIQKILRNYLEFKGSPELAFSPEGIEDMNKNIEKYNDGKLHQPINKVRVFELGSKFQVGQTGNKKDKYVEAAKGTNLFFAVYEDKNGKRNYETIPLNIVIERQKQGLLACPESNEKGEKLLFQLSPNDFVYLTTEEENDNATPINFSLLSKEQINNLYKIVSFTGNRLYGIPICVATTIVNKAEYTQLNKIEFTKEKDLLLKLNVNRLGDVKTFTANDIRKIFNRQE

SEQ ID NO: 123 - protein, 1092 aa, Bacillus sp.
  MISC_FEATURE: APG06646.1_RGN
MRYSIGLDIGTTSIGNAVINKDLQRFEHLGVRIFDAAENPKDGSSLSAPRRLARSSRRRLRRRKHRVERTKQLLINKGLLTKTQVKNLYNSKNINLDIWDIRVSGIDRKLFNNEFARVLIHFSKNRGFKSNRKSELKEDDNGAILSAVKENRELMDEKGYRTIAEMLVSDEKYEGTKRNKGGDYSHVVARSDIENEICLLFQKQREYGHPFATEENEEAFLSIWSSQRPFSTKDDIVKKIGNCTLEPKEKRAPKSTYTFERFRALDKLNRLRILSTTAPSRPLTNEERKSILSSLFSKKEVKYKELRKLLKLTDDQRFNEIYYSPDETIEKTENRTFLSLESQYKIKKIIEKTESKNMQSSYHPIDYDTIGYALTVFKDDKDIQHYLQNSYIDSKGKAIPNMANREYNLELIEELLGLSFAKFGHLSLKALNNILPYMEEGEPYHIACEMASYQFSQRLSKEKHRLLPPIPVDEIPNPVVVRALTQVRKVLNSIIKKYGPPSDIYIELAREMSKPFKERKSLEREFNENRQINEKAKAHISELYRIPNDPRPHDILKFKLWNEQNGICPYSLKPISIEYLFNIGYAEVDHIIPYSRSFDDSNGNKVLVLTRENQNKLNRTPYEWFGHEENRWEDFVSFIRTMKVGKKKKNMLLKKNFDEEQEEQILSRNLNDTRYITRYIKSFIEDNLEFRTEENKEQYVHTVNGAYTSLMRKRWGLNKDRRGNDLHHAVDAAIIAVSLPFKNKVNAYFKRQETGLSKLLNNKKDIFPEPWRNFIKELEARMIQDPEKMKRALESLELETYGEIFLNKLKPIFVSRMPKHSIKGQIHEETIRRVRGFTEEGFLVTVKKTRLDQIPFDKNGDFPMYGKETDIKTYMAIKQRYLEYGQDKQKAFAVPLRKPSKNPKNAPIVRSVKIEGKANRVVMLDDKAAADNASIVRTEVFRHKKTGEYYLTPVYVADILSNKIPDRLITIKKSYSDWDRITDEHEYLFSLYNNDLVKIILPKEKETKKYTGGNHLWQEGFFYFKGVDSSNAGIKIINHLNSFEARIGTKRLIAFEKYQVNPLGEINKVHGEKRPGELLNKEEIKENRKNIS

SEQ ID NO: 124 - protein, 1735 aa, Pedobacter sp.
  MISC_FEATURE: APG06622_RGN
MTKNILGLDLGTNSIGWALIKIDHENKTLKIIALGSRIIPMDGQEFSKFNAGQKIESAAGNRTALHRARITKERYLLRRDRLHLVLNLLEALPNHYKIEVDFERNDKRCGQFKEGKEPKMAYLPTKNLENKFDFYFEEAFNEMIEDLQKVNPEIKNEKKKRVPKDWTIYFLRNKAMSQKVSLEELAWVLLSYNQKRGTDSEEIENEDEKSEIKEQIDLKVIKAEKKVDVNGAFFEITLNDAENFKYKEYTTKQLTFEDDVKEVTKILKLDEAGNIINEKTAYQISDLYNLTLANIEHTDINDKKAKHKYDFIYTNGWCTEKKKENFDVTYQKLEKQIKEESKVITELFVVSNKYDFAGKPESIIPSIKLPDFNSEGSKDWTLLKKKTEKEIVKSEKTLSGWIYDVLKNDVNTGERTKIIGGLFQTIDRKFYREELYQIINTQRKFHTSTLDDKDTFEKCVKLLYPHNKDHSKTLLENKQALTNLLIEDILLYQRPLKSKKSEISDCKYEIDYWKEDVNISTGEVVEIPVYKKAIFASHPLFQEFRIWDKIHNIKLIQLESKDADGNTQTNVDITSQYFKPENYRALFNHFNGRSTVAIDDFLKFCEEQFKLGIGKKGERKILWNYPVEEEFKGNETRKGFENRFRKCGFDGFDDFMTQQKEIELWHYLYSVSSAERKKVSQVKDSSDPKFGKTGIWNFFTKYFKDENISLETLEKLCRDFETYPKFTSKYASYSVKALNKMLAVMRVGKNFLTAESVNEKWQEKYIERADTIIKKNNEIDWSAESIDLTDIILNDVNVKNGEIPFPKGLFNTFKSFETVDDFEFLNLTQASYFIYGRHSELAQAKYWNSPTKIREEITKELKHHSLNNPTAEKVLKETLKVVADIWEIYGNSEEKFFNEIHLEVARELQKSNQEKKDIIERQKNNRAENNRIRNILEEFLSSSPYNAKRGNQDHFERLKIVEDGAKVRSYSDKEFYSNNKDKFSKIDIEVILKKKKITQSDFEKYKLWIEQGYKSPYTDQIIKLTDLFDGNKYNVDHIFSRAAITNDSLNNKVVCEAVINRFKSYKTGREFIAQFGGKTHTIFDDKLNKNVTFSLIDEDAYVSLVKSQFKDAKRLILLSKEVPKAFTESQLNNAKYIARKAMELLSHIVREEGEVEFRSKNVLPVSGAITDRLKKEWKINQIWTELLKPRFERLNKIHNSEAFGSYAISKSGHQYFDINTKYILGENDKFDLKRLDHRHHALDALIIALCTDNHVQYFNNINSGITNKKKGKMEAIKKQRAGIKRQIMYSEKDKENPNEKVWRYMLPGSFRNKESVNNEKDSVVDLSWENNYSAKESNDYRKTILECLDNCIVSFKNDFKIVSKSSNKYESYYDENGNLRLDSNGKPQKEFISQQNNNQKHWSVRKPLHTDNPSAEITLQFDRLKLIDNLGKVDLIIEEKIKDAVKEILGMHNNKIGKAESYLKKNPLILEEKKIEYTDFKISNKKYRKRQPITNLSVRTGTGALPTYDSVVDRINKVSDFVLRNELLQHLKINDNDIDKAFSIEGINEFNSNRKIPVFRLPISESATLKFKIGHKNSNSHKWVETGGNFHFRIADEENSRDYETIPLRIAIEMEKDNIIRRQIVDNENEIVLSPNDLVYVPLEKNEIVDFNNLTIQQIKRIYKFVFSTKKEAHFIPYSSSAEIIKNENGTNGYSERTKDFFDGNVLQDDKGKPIQVKSVCWKLKVDRLGNISKA

SEQ ID NO: 125 - protein, 1224 aa, Chitinophaga sp.
  MISC_FEATURE: APG02787_RGN
MKKLIVGLDLGVNSIGWAVVGDDDSNRQILGMGSRIIPLSPDDNNEFVTGNAISKNAKRTEKRTQRKGYDRYQQRRRKLVAFLERHSMMVEKELMCLPPLELWALRNKGITQALSSRELGRVLYHLNQRRGYRSSRSEESSDGKKNTAYVEEVKGRYEELKTRGITIGQHFYQKLQTAHNRNEPYRIKQQVFPRQAYIDEFDAIINQQKNHHSSLTADEIAFLRDEIIYMQRPLKSQKGLVSICEFEGQYRKNAKDAEVFVGPKVAPRSSPLAQVCKIWESINNITFTNKRREPYPINTDQKLRLFDALNKTERLSQKAIFFILGIKPGDGYTGNKQTAKGIQGNLTNAAISTIIPERKDLLNFELKIVVDEEDAHLINRSNGEIISTVQKKTVSADYERSPFFRLWHVIYSISDIDKCIETLMEKFGLTKEQAVALSRLDFRKAGFANKSARAMRKILPYLMDGHIFSDAMSLAGYNHSASLTHEENLKRQLKGSLPLLKKNSLRQPVVEKILNQMIGVMNAIIKEWGRPDEIRVELARELKQSAEERNKAFAALSKREREGEIITKRIEAEFRQFGIRATRNNILKWRLFHEISNDEARLNATCVYCGHPFGITDALRGSSVDIEHIIPKSKLFDDSQGNKTLVHRRCNEDKGDRTAFDFMSAKGESVLASYIETVDRLYQSNVISRHKRDRLLTTGDDIPKDFIERQLRETQYIARKAKEILEQICYNVWSTSGQITEYLRRIWGWNDVLMNLQLPVYRDLGLTEWKEYTDRDGNLHRQEVIKDWSKRNDHRHHAIDALTIACTRQGFIQRINRLNATNNREEMRASLNGNYDPKKNLLENYIFALKPFSTKQVEVAAAQILISFKPGKRVATLSKLKAKGKNSGTGVIVPRGPLSEESVYGRVRLMDSKKQPVRYLFEHPELIFKPYIRVLVEERLASYSQDLKKALASLKKDPIYLDGTKTIILEWGSCYKDEVVIKYPLTDIKAKDTQFIIDGHIRAIVNERLSQYKGNEKKAFEHPLYSDAACTKEIRSVRCLTGLTAVVSVKKDESGREIGFVKPGNNHHIALYTDAEGQKREHLCTFWHAVERKKWGMPAVITQPGVIWDNILQKQDNFPQAFLEKLPLEAWTFDKSLQQNEMFIVGLTIEEVQTCIDSFDYARLSKHLYRIQKLSSTGYKIVLRHHLATTIEHTRDMIGIASPSSFTGIKVYVSKTGKISMPHD

SEQ ID NO: 126 - protein, 1457 aa, Mucilaginibacter sp.
  MISC_FEATURE: APG06248_RGN
MKNILGLDLGTNSIGWALIQSDFDNKEGKILGTGSRIIPMSQDIKDEYGKGNSISQTADRTRFRSLRRLRERHLLRRERLHRILNILGFLPEHYADQIDFKNRLGQYLPEKEPKLAYRNNEFIFKASFEEMLIDFREQQPEMLQGDKKVPYDWTIYYLRKKALTQKVEKAELAWLILNFNQKRGYYQLRGEEQQENPNKKVEFHSLKVVDVIADETQRGKAETWYSLILENGWVYRRSSKTPLDNWRDKQRDFIVTTDLNDDGSIKKDKDGNIKRSFRAPDENDWTLLKKKTEQDIDHANKTAGAYIYDHLLVAPDQKIKGKLVRTIERRFYKTELKAILAKQQNFHAELQNKDLFLDCVRELYRHNLSHLSNLNQKDTIHLLTEDIIFYQRPLRSQKSSIGNCPLEFRRYQNKEGGDQTEYLKVIPKSHPLYQEFRLWQWIYNLGIYQKEDDTNVTADLIKGIQGYQDLFDFLNSKKEIKQDTLIKFLLSQTGLKGKELNKAALTLRWNFVEDKTYPCNETGTEIRARLAKVAYIPENFLTAEKALSLWHIIYSVNDKKEYELALRKFAKKHQIDEETFFINFQKFPPFQSEYGAFSEKAIKKLLPLIRLGKYWHWEAIDPKSQERIEKILSGEADQNIKERIREKAMHLTREEHFQGLQLWLANYIVYDRHAEAANPDKWSTVSDLEDYLKELKQHSLRNPIVEQVVTETLRVVKDIWLTYGNGAKNFFDEIHIELAREMKNTMEERKRLTSIVTDNENTNLRIKALLVELFEDGNIENVRPYSPIQHEALKIFEDGILNSGIEIDDDILKISKTPQPTSTELKRYKLWLEQKYRSPYTGNVIPLNRLFTTDYEIEHIIPQSRFFDDSFSNKIICESAINKLKDKQLGLEFIKNHAGTIVELGLGKTARVFDEERYQDFVKANYTKNPGKRSKLMLEEIPDKMIARQLNDTRYISKFITSVLSNIVRSETKDDGVNSKNVLLCNGRITSVLRQDWGMNDIWNELILPRFERLNQITDSTVFTAWNENHQKFLPTVPMGFSKGFQRKRIDHRHHAMDALIIASCTRDHINLLNNEYAKSSKRFDLNRKLRKFEKVAYKSPVNGQQIDKDIPTVFIKPWQRFTIDAKCSLEDIIVSFKQNLRVINKTTNYFDGYKDEHGIVNFDNKGAPVKQQRKQTKGDSWAIRKPMHKDFVYGKVDLKHIKIPKGKFATAIRKSLDTTFDQKKIQTITDTGVQKILINYLQSKDNKAELAFSPEGIEDMNQNIRAYNDGKLHQPIKKVRVFEIGSRFPLGETGNKKTKYVETAKGTNLFFAIYQHKNKRNYETVPLNTVIERQKQHLSPVPTEDDKGGTLLFYLSPNDLVYVPTPDELGNNLGGLDIRNLNKEQRRRIYKVEKASGVECYFIRQDIAYLIKSYDATTKIGELESQNKLQTTMSSDRLKIADVCIKLKIDRLGISR

SEQ ID NO: 127 - protein, 1662 aa, Acidovorax sp.
  MISC_FEATURE: APG06007_RGN
MKKILGLDIGTTSIGYSIIKVSDEKNENIISDKVAASDINNDRIGIFEEAIGVRIINQDTDRFDRGLKLNDPKGSTLTPTANRRKFRGVRRMRNRYKLRRNKLYKVLSILGLTPDESYFTNKKGKRGKDNDIGKALYGLRERAAREKISLSELARVLLHLNQLRGYSSDRFANDEETKFDYYLTEVVEADWENRTAVFEKGSTEDVKYYQFKAKLRFVEPYVIVEDDEKTILYEVEGYIFKKELDFEVGDFITIKAPEFKQNKKGKVVIEEYYKITPTKPDATDWKYKYQTLHKNLSDWCKAGGTVGSYFYKNFYELTTLSRIRNNVVNREWYENEFDAIWTLQYEFYKDFFEKIDVSELVKGVFKDYSAVLNDVISKSGNKAQLQTLIKDKIIFYQRPWQQAKSKGRCEFEKIKVKRKFAIKGTGTKELREEHIGRKVVPRSHPIFQDFKVWQQINNVRLIWNTADEKINLFENAELSEKLTGKTIEKVKELLFKKLQGSKTLSWRTFVKEELGLDTYDEIEEKRKSKVSKKQGLDIETGEIVDSFFSVNFRKRKRDGTFDDIKLKGNTTKAELQNILKEKRAEWFDTLHNQNKKVTNLQLLWEIIYDITNSDATKVSSIIKKHFDFDESVCLTLAKVQFDDAGMANLSAKAIRNLLPLMSDGANYSKITKAKVDELISLNTSETDVDADDKLNGLKDFVTDRKARIRLSKFSNENDFKYLNYWEAAAIVYGSHSSKKSSETKIMERVKNHSMNNPVVEKIVNEAISIVNLLKEKYGFDEIRIELSRELRASADERQQMWEGMSNGAAKNEWAKKMLREIKQAMLDNNRDISYLDTEISNSNLDKIKIIEDVVKYQKPVEFKTKEKEYKLTEPTKAEVTKYLLWLEQNFKCPYTNQPIPLTDVFARGKVVEIEHIIPRERYYSNAYANKVITWREVNQEKGNKTAYEFIVSKRNPAGTVQVGKKEISLVSASQWENHVKEMFPKSGKRTNLLRKEIPEDPIERTLKENQYINKKLKEKLGELVGSDKVWVTSGAITDMLREKWKLNDIWKELVQERFLKFNNGEVKDRLNLKYTTKYYNNKTNQYEDVEKFAGMSKRIDHRHHALDAIIIACTKQSHIQYINNLNAINSADIENDDNKKTKYKGIKTDVCIGNSSSKFKFPWDENKFIPEVKQALQNILISHKNSNVLISPSKHRNNKDINSGKVASVRGELHLQTNYAKKKYFENEKIDIVKLIPLLFKKKFENQNQTLVRFKSFDEIIKEAVLKEKYQNVLISLFKDYDSEKLSTQTTKDFSKKILKRIEDEKLFIHEKSGEKMTWLSTFTEKNASVRPMGLAMDLNSEKEIKDISNPRLRRIGQYRLNYINKKIIEIKALKLPFKEEENNRIREVREIPLYNNAIYELRIKQKDGKYHWVEIKDVQHSDLENIEYAKQETTIAVKNKIKDFSLDELKERYISNPIFLSEKPTPVKKARQKSFFQDLYQLNDGRYVYSRDVFMTYVFVPEDSNRKDAKRELEFLKFFDAVKIVTLEKPEKIDYQKLIKKEDHKLLFTLSKNDIVYIPEEILTDEQIAEINWNDKRDIVPKLFVVKEMTPSRNEIVFQHLYKSDSIRVNGDEAKNILNTEKLEEQIKYGDTNMWKRCIKVDIDKLGTEIKPYWENNKIVL

SEQ ID NO: 128 - protein, 1075 aa, Bacillus sp.
  MISC_FEATURE: APG02874_RGN
MDYRIGLDIGTNSVGWGVIRMQYNDLLERYEKQGIVDAGVRMFDKAEIPKTGASLAAPRREARSSRKRLRRRSQRKKAIRYLIILHELLSEDQLQQLYPLQKESIDIWDIRLESLDRVLNQTEWARLLIHLGQRRGFKSNRKSEYKEEETGKVLVNIQENQKALQQYRTVAEMWMKDAKFSQFDKKRNAPGEYLFSVSRYDLQNEIQTIFESQRNLGSPYATTDLEEEYISVWSKQLPFASGEDILKKVGYCSLERKERRIPKATYTFQYFILLDGLNKIRVGADARQLTTEERSILIEKILTRNDYFSKKSLPDLTYGDLRKWLALDSSLLFKDLTYDPNEKVSKVEKKVFANLKSLYELRKVVETSSNGQSFERIDYDTFGYALTVYKTDEDIRRYLKKPSNLAHKVYEEDLIERLLSLSYEKFGHLSLKAIQTILPYMEDGMMYTEAVQAAGYDITGLQSAKRTLLLPTIPADITNPVVRRALTQTRKVVNAIIKRYGSPLTIHIELARELSKDHQERQQILKNQQANYERNKGAISVLVENGILNPTGYDIVRYKLWKEQGERCAYSLKVIPPSVFFGELKRERNHIPTLEVDHILPYSQSFMDNYHNKVLVYSDENQKKGNRIPSQYLMAVSPEKWTKFEEYVSSNKGFSKQKRQYLLKKDYSSRERDIVKERHLVDTRYATRFMKNFIEKTLLFKESRSSSLTKRVQTVNGKITAHFRKRWGLEKERTETYLHHALDAIVVACTDQHMVTRVTEYYQERERNVRQPYFPWPWEGFRDELLNYLNRQPDSLEISQSIKQNLFLRDYLMVSRMPKHSVTGMSHKQTIRSKACVDEKGKVKTTKRVLLQDIKFDSNGDFKMIGKEQDMATYNAIKERFLSSGGNVKSAFTEPLHKPSKKGKGNVIRKVTVEDQTKSFVRDVNGGVAENGSLVRIDLFEKEGMYYVVPIYVGDTVLKQLPIKISASNRGYYKWVELDENYRFKFSLYAHDLIRIVTKDEDRFFYFSYFDNDGNRIKFLNINSPTGKNENRYGVRSIKLIEKYNVSTLGDISLVKSEERQLFQGMKKKVLNIIN

SEQ ID NO: 129 - protein, 1068 aa, Bacillus sp.
  MISC_FEATURE: APG03850_RGN
MKYVLGLDIGIASCGWAVINQEKHRIEDLGVRIFDKAENPKDGKSLATPRRDARSTRRTLRRKKHRMQRIKILLVKHGLLSKTEIDHLYESATEIDVWYLRLNALERRLNPKEFARVLIHLAKRRGFKSNRKETTLSENGQILENISENLQIMEQQNYRTVGEMILKDKKFENHKRNKDGTYIGTVTRQQLKEEIQMIFNAQRLYKNDYATEEFESSYLEIWASQRPYASKDQIEKMIGYCTLEPKEKRVPKASWSFQYFVALQTINNLRLINKDRIEELSFEEKNQIMNLALEKSIVKYIDIRKLLSIPNEFHFNNLLYSADTVDTAVENKKCIEFKEYHSINKLYKQIYGKSVPNLLPIDYDTIACGLTIFKDDKDILAYLQNKYVNAKGKPISNLAKKTYDDTFIQALLTLNFSKMGHLSFKALKNIIPFLEEGLSYDKACEKAGYNFKGTSHAEKTKYLPVIPQNTNPVVHRALSQTRKVINAIIKKYGSPSAIHIETARELSKTFQERKEIDSMYQDNSKKNEHAIHKLKELGLINPSGINIVKFKLWNEQDGRCMYSGKYIEPHRLFEEGYTEVDHILPYSRSLDDSYNNKALTLGIENQRKGNKTPYEYIGKTSIWHEFETRVQSNKRINKKKQQKLLLQYFSYTREQEFIKRNLNDTRYATIYLSTLIQQHLIFSESSRKKKVHTVSGIITSHLRSRWGFNKDRKEGHIHHALDAVIVAVTSDHMIQRVTKYYKLKELNRNLQAKRMQFPEPWEGFRLELEARISPNTQQYLKRILFKNYADVNLSEIKPIFVSRMPKRSITGELHQETIRKLIGYNEKGKVLTAIKTKLEDIPFDANGDFPMYGKETDLYTYNAIKERYLSHKKDKRKSFQDPLYKPTKSGEIGPLIKSIKIMDTRTIVNPVNQGKGVVYNSKIARTDVFKKDEKYYLIPIYTIDLLKNILPQKAITAGKGYEDWTTIDPSFTFLFSLFPNDLIQIVPSKNKTIKARTTVSKKEVLLPSLTGYFKGVHSGTAGITVETHDGSVIANVGSKQLLLFEKYQVDVLGHYTKIKEEKRIGMVI

SEQ ID NO: 130 - protein, 1081 aa, Bacillus sp.
  MISC_FEATURE: APG07553_RGN
MQYVLGLDIGIASCGWAVINQEKERIEDLGVRIFDKAENPKDGKSLAAPRRDARSTRRTLRRKKHRMQRIKILLVKHGLLSQTELDHLYESATEVDVWNLRLDAIERKLNPKEFTRVLIHLAKRRGFKSNSKETTLSENGQILESISENQQIMEQKNYKTIGEMILKDKKFENHKRNKDGTYIGTVTRQQLQDEIQIIFNAQRLYKNNYATKEFESSYLEIWASQRPYASKDQIEKMIGYCTLEQKEKRVPRASWSFQYFVALHTINNLRLISKDRIEELSFKEKKQIMNLALEKPIVKYIDIRKLLSIPNELHFNSLLYSADTVDTTVENRKCIELKEYHSINKVYKQIYGKNALNLLPIDYDTIAYGLTIFKDDKDILEHLKNKYVNAKGKPINNLAKKTYDDTFIQALLTLNFSKMGHLSFKALKNIIPFLEEGLSYDKACEKAGYNFKGTSYTEQTKYLPVIPQNTNPVVHRALSQTKKVINAIIKKYGSPNAIHIETARELSKTFQERKEIDSMYQDNSKKNEHAIHKLKELGNINPSGINIVKFKLWNEQDGKCMYSGKYIEPHRLFEEGYTEVDHILPYSRSLDDSYNNKTLTLGIENQRKGNKTPYEYMGNTSIWDEYEIRVQSNKKINKKKQQKLLLQHFSYAREQEFIERNLNDTRYATIYLSSLIQQHLIFSESSRKKKVHTVSGIITSHLRSRWGFNKDRKEGHIHHALDAVIVAVTSDHMIQRVTKYYKLKELNRNLQAKRMPFPEPWEGFRLELEARISPNTQQYLKGLRFKNYADVNLCEIKPIFVSKMPKRSITGELHQETIRKFIGYNEKGKVLTAIKTKLEDIPFDANGDFPMYGKETDLYTYNSIKERYLSHKKDKRKSFQEPLYKPTKSGGIGPLIKSIKIMDTRTIVNPVNQGKGVVYNSKIARTDVFKKDDKYYLIPIYTIDLMKNILPQKAITAGKGYEDWITIDHSFTFLFSLFPNDLIKIVPSKNKEIKARSTSSKKEILLPSLIGYFKSVHSGTAGITVESHDGRFIANVGSKQLLLFEKYQVDVLGHYTKIKEEKRIGMATCNDNKKSTAFGSL

SEQ ID NO: 131 - protein, 1404 aa, Chryseobacterium sp.
  MISC_FEATURE: APG03031_RGN
MKKTLGIDLGTNSIGWVIRNADLLDNQIEDFGVITFEKGVASEKGNEFPKVQKRTESRGKRRNYQSEKYRKFALLAFLIQKNMCPLTMDEFCNWKDYRKGKKREYPQSEEFLNWIRFDFNGDGLPDFHLFGKEKDDSYYVFRAFAADENHKNVFDNNPHILGRVLYQMVQRRGFKGRDEEEAKTMLVGSDKNGTKGRNDIEEYIEKYKTLGAALYYHQKDFGGRIKQRYNLRKDNENELKEICKIHQLSQEDYEKLWKAIIWQRPLRTQKGLVGNCIYEKNKKRVAVSHPLYEEYRTWVFINNLNIIPPFGEEKQNYISEKIYPLFYKSKPDFELSDIDKQLKKDGAKRTSKHNDKTKVLSVKLLKQFQDVFGEDWKQKLQWDINGDRNSQPEKKEKSLYTFEDLWHILLTFDGQENLKKFALEKLNLDDEKAIKFSKIKLQQGYATLSISAIKKILPYLQRGFLYSHAVYMANLYKMLGETTISETLTNHFSDEILKILENDDFNRKNSAIINSLISEMLNDDNRYYIADNRNLDKTEEQIVLKSITDNYGLETWGNFDEEKKMEIIDFVSSKYLEFLKKTYTEKGNLFIQPERIHDKIFNFLKETYHVSEDKIKYLWHPSEQENYAKADEYFEYSIGSKKYYVKEESTQNFLSRNPNAEFDGRQLKLLGNPEPLSKGFKNPMALKSLHKLKNLVNYLLQTGKIDEGTRVVIEIARELNDKNKRKAIENWQKDREKENEAFRKEIEVYKEQFPNINLIDENTLIRKIRLWHEQNKICLYTGKTIPFSELIIGNKYDFEHTIPASISFDNELKNLTISDSSYNRLYKGKKFPTQLSNYDSEQTINGESCNSILRNIEFIFGERIVEYKEIKGKTEKIVKWKKIDELEKQFDEWKKKASYASTKEIKDNCIVKYHTIKMDLDYLKSKLATFTITEYKAGWRNSQIRDTQIITKYALPYFKTLFKRVSVEKGGVTDIFKKVYKVQSRNSKKDRSVHSHHAQDAAILTLIPNAFHRERIIKAYENEIDNRTGKTYHEQPLDWENFSEKYILELQDKVLINNLTDNRTITQTYKTVRKRGKVVYDIDENGNSLKRVSKGDTIRGQLHGETFYGAIKQPVRDEDNKILFDENKKMILKDEIYLAVRKPLVYKKDANSPGFKTLDEVEKVIVDKGLFKMIKKQVEESDFKTALIDGVYMLNESGEKVNKIRRIRCFENGLKYTTAIKVHEHSFVSHKEYKQSTLATNGENTYCLFYKNDKGKAMKILSIVDLAELKLKNIQNLYNEPEFSSFEVGKGKNKYKIPLYSVLKSGDKVLFYKENIYELKDLEQKELSDRMFKMYQFEKDGRIKFRHHLAAGIDTELKKENPENSSVNFEEKQVFLRLSQGQWNFAIDGKDFEISLDGKINWKF

SEQ ID NO: 132 - protein, 1092 aa, Bacillus sp.
  MISC_FEATURE: APG09208_RGN
MRYSIGLDIGTTSIGSAVINNDLQRFEHLGVRIFDAAENPKDGSSLSAPRRLARSSRKRLRRRKHRVERTKQILINKGLLTKTQVKNLYNSKNVNLDVWDIRVSGLDRKLFNDEFARVLIHFSKNRGFKSNRKSELKEDDNGAILSAVKENKELMEEKGYRTIAEMLVLDERYEGTKRNKDGDYSHVVSRSDIENEIRLLFQKQREYGHPFAIEENEEAFLAIWSSQRPFATKDDIVKKIGTCTLEPREKRAPKSTYTFERFRALDKLNRLRILSTTTPSRPLTNEERDSILNSLFSKKEVKYKELRKMLKLTDDQRFNEIYYSPDETIEKTENRVFLSSESQYKIKKIIEKTESKNMLSTYCPIDYDTIGYALTVFKDDKDIQHYLQNRYVDSKGKAISNMANREYNLELIEELLGLSFSKFGHLSLKALNNILPYMEEGEPYHIACEMAGYQFSQRLTKEKHRLLPPIPVDEIPNPVVVRALTQVRKVLNSIIKKYGPPSDIYIELAREMGKPFKERKSLEREFNENRQVNEKAKAHISELYRVPNDPRPHDILKFKLWKEQNGICPYSFKPISVDYLFNIGYTEVDHIIPYSRSFDDSNGNKVLVLTNENRNKLNRTPYEWFGHDENRWGDFVSFVRTMKVGKKKKDMLLKKNFDEEQEEQILSRNLNDTRYITRYIKSFIEDNLEFRTEENKKQYVHTVNGGYTSLMRKRWGLNKDRRGNDLHHAVDAAIIAVSLPFKHKVNTYFKRQEIGLSNLSNNKKDIFPEPWRNFIKELEARMIQDPEKMKTALESLELETYGEIFLNKLKPIFVSRMPKHSIKGQIHEETIRRVRGLTEEGFLVTVKKTRLDQIPFDKNGDFPMYGKETDIKTYMAIKQRYLEYGQDKQKAFAIPLRKPSKNPENAPIVRSVKIEGKANRVVMLDDKAAADNASIARTEVFRHKETGEYYVTPVYVADIVSNKIPDRLITLKKPYSEWDRITDEYEYLFSLYNNDLIKIVLPKEKETKKYTGGNHLWQEGFFYFKGVDSSNASIKIIDHLNSFEVRIGIRRLIAFEKYQVNPLGEINKVHGEKRPGELLNEEEIKENRKNIS

SEQ ID NO: 133 - protein, 1150 aa, Enterococcus sp.
  MISC_FEATURE: APG05586_RGN
MYSIGLDLGISSVGWSVIDEETGKIVDLGVRLFSAKNSEKNLERRTSRGARRLIRRKTNRLKDAKKLLEAIGFYEDKALKNVCPYQLRVKGLTEGLTKGELYKVVLHIVKKRGISYLDEDDAEAAKESQDYKEQVRKNAQLLTKYTPGQIQLQRLKENNRVKTGINGQGHYQLNVFKVSAYADELATILKTQQALYPNELTDDWIALFVQPGIAENAGLIYRKRPYYHGPGNEANNSPYGRWSDFQKTGQPAANIFDKLIGKDFQGELRASGLSLSAQQYNLLNDLTNLKIDGEVSLSPEQKEFILTELMTKEFARFGVNDIAKLLGVKKEQLSGWRLDKKGKPEIHTLKGYRNWRKIFAEAGIDLATLPTETIDCLAKVLTLNTEREGVENTLAFELPELAEPVKSLVLDHYKELSQSISTQAWHRFSLKTLHLLIPELIKSTSEQNTLLEQFQLKAGVRKRYSDYKKLPTKEVLAEIYNPTVNKTVSQAFKVMDALLEKYGKDQIHYITVEMPRDDNEEEERKRIKELQTKNSQRKNDSQQYFLQKSGWSQEKFQATIHKNRRFLAKLLYYFEQDGVCAYTGNPISPELLVSDSTEIDHIIPISISLDDSINNKVLVLSHANQVKGQQTPYDARMAGAFNKINGKFSNWDEYQKWVESRPFSRKKVNNLLETRNIFDSEQVQKFLSRNLNDTRYASRLVLNTLQSFFENQDTIVRVVNGSFTHTLRKKWGADLDKTRETHHHHAVDATLCAVTPFVKVSRYHYAVNEETGEKFMREIDVETGEILDEIPYREYKKAKHYERKTYQVKWSNFREQLKPITIHPKIKFSHQVDRKANRKLSDATIYSVREKTEVKTLKSGKEKITTDEYTIGKIKDIYTVDGWEAFKKKQDKLLMKEFDEKTYELLVTIAATTPDFQEVEEKNGKVKRVKRSPFAVYCEENGIPAIRKYAKKNNGPVIRSLKYYDGKLNKHINITKDEKGRPVEQTKNGRKVTLQSLKPYRYDIYQDLETKAYYTVQLYYSDLRFVEGEYGITEKEYMKKVAEQTKGQVVRFCFSLQKNDGLEIEWKDSQRYDVRFYNFQSANSINFKGLEQEMIPAENQFKQKPYNNGAINLNIAKYGKEGKKLRKFNTDILGKKHHLSYEKEPKNIIK

SEQ ID NO: 134 - protein, 1150 aa, Enterococcus sp.
  MISC_FEATURE: APG08770_RGN
MYSIGLDLGISSVGWSVIDEETGKIVDLGVRLFSAKNSEKNLERRTSRGARRLIRRKTNRLKDAKKLLEAIGFYEDKALKNVCPYQLRVKGLTEGLTKGELYKVVLHIVKKRGISYLDEDDAEAAKESQDYKEQVRKNAQLLTKYTPGQIQLQRLKENNRVKTGINGQGNYQLNVFKVSAYADELATILKTQQALYPNELTDDWIALFVQPGIAEDAGLIYRKRPYYHGPGNEANNSPYGRWSDFQKTGQPAANIFDKLIGKDFQGELRASGLSLSAQQYNLLNDLTNLKIDGEQPLSPTQKEFILTELMTKEFARFGVNDIAKLLGVKKEQLSGWRLDKKGKPEIHTLKGYRNWRKIFAEAGIDLATLPTETIDCLAKVLTLNTEREGVENTLAFELPELAEPVKSLVLDHYKELSQSISTQAWHRFSLKTLHLLIPELIKSTSEQNTLLEQFQLKAGVRKRYSDYKKLPTKEVLAEIYNPTVNKTVSQAFKVMDALLEKYGKDQIHYITVEMPRDDNEEEERKRIKELQTKNSQRKNDSQQYFLQKSGWSQEKFQATIHKNRRFLAKLLYYFEQDGVCAYTGNPISPELLVSDSTEIDHIIPISISLDDSINNKVLVLSHANQVKGQQTPYDAWMAGAFKKINGKFSNWDEYQKWVESRPFSRKKANNLLETRNIFDSEQVQNFLSRNLNDTRYASRLVLNTLQSFFENQDTIVRVVNGSFTHTLRKKWGADLDKTRETHHHHAIDASLCAVTPFVKVSRYHYAVNEETGEKFMREIDVETGEILDEIPYREYKKAKHYERKTYQVKWSNFREQLKPLTIHPKIKFSHQVDRKANRKLSDATIYSVREKTEVKTLKSGKEKITTDEYTIGKIKDIYTVDGWEAFKKKQDKLLMKEFDEKTYELLVTIAATTPDFQEVEEKNGKVKRVKRSPFAVYCEENGIPAIRKYAKKNNGPVIRSLKYYDGKLNKHINITKDEKGRPVEQTKNGRKVTLQSLKPYRYDIYQDLETKAYYTVQLYYSDLRFVEGEYGITEKEYMKKVAEQTKGQVVRFCFSLQKNDGLEIEWKDSQRYDVRFYNFQSANSINFKGLEQEMMPAENQFKQKPYNNGAINLNIAKYGKEGNKLRKFNTDILGKKHHLSYEKEPKNIIK

SEQ ID NO: 135 - protein, 1053 aa, Staphylococcus sp.
  MISC_FEATURE: APG08167_RGN
MKRHYILGLDIGITSVGYGIIDYETREVIDAGVRLFKEANVENNEGRRSKRGARRLKRRRKHRLQSVKKLLFDYDLLTNHSELSGINPYEARVKGLSQNLSEVEFSGALLHLAKRRGVHNVNEVEEDTRNELSTKEQISRNSKALEEKYVAELQLERLKTDSEVRGAINRFKTSDYVKEAKQLLKVQKEYHQLDQSFIDTYIDLLETRRTYYEGPGKGSPFGWKDIKEWYEMLIGHCTYFPEELRSVKYAYNADLYNALNDLNNLVISRDDNEKLAYYEKFQIIENVFKQKKKPTLKQISKEIFVNEEDIKGYRVTSTGKPEFTKFKIYHDIKGIKERKEIIENAEVLDQIAEILTIYQSSEDIQEELAKLNSELTQEEIEQISKLTGYTGTHSLSLKAINLILDELWHTSDNQMAIFNRLKLVPKKMDLSQQKEIPTTLVDDFILSPVVKRSFIQSIKVINAIIKKYGLPSDIIIELAREKNSKDAQKLINEMQKRNRQTNERIEEIIRTTGKENAKYLIEKIKLHNMQEGKCLYSLEAIPLEDLLNNPFNYEVDHIIPRSVSFDNSFNNKVLVKQEENSKKDNRTPFQYLSSSDSKMDYETFKKHILNLSKGKDRISKKKKVYLLEERDINRFSVQKDFINRNLVDTRYATRELMTLLRSYFSVNNLDVKVKSINGGFTSFLRRKWKFKKERNQGYKHHAEDALIIANADYVFKEWKKLDRANKVMENQTVEENQAESMPEIETEQEYKEIFITPHQIQHIKDFKDYKYSHRVDKKSNRELVNDTLYSTRKDDKGNTLIVNNLNGLYDKDNDKLKKLMNQSPEKLLMYHHDPQTYQKLKLIMEQYGGEKNPLYKYHEETGNYLTKYSKKDNGPVIKKIKYYGNKLNVHLDITDDYPNSRNKVVKLSLKPFRFDVYLDNGVYKFVTIKNLDVIKKEDYYEVNSKCYKEAKKLKQISDQAEFIASFYNNDLIKVNGELYRIIGVNNDLLNRIEVNMVDITYKEYLETMNDKRTPRIFKAITGKTQSIKKYSTDILGNLYEVKSKQNPQMIMKR

SEQ ID NO: 136 - protein, 1052 aa, Staphylococcus sp.
  MISC_FEATURE: APG01604_RGN
MVTKYILGLDIGITSVGYGIINYEDKTIIDAGVRLFPEANVENNEGRRSKRGARRLKRRRIHRLDRIKQLLSEYNLVDLDNIPQSPSPYEIRVKGLREELSKDELVIALLHIAKRRGIHNVEAVDETQDEGNELSTKEQLAKNNNLLKDKYVCELLLERLKDGKVRGEKNRFKTTDIIKEVKQLLETQKEAHQLDDDFINRYIDLIETRREYFEGPGKGSPFGWGGDLKKWYETLMGHCTYFPNELRSVKYSYSADLFNALNDLNNLVIQREGNSKLEYHEKYHIIENVFKQKKKPTLKQIANEIGVSPDDIKGFRINKSGKETFTEFKLYHDLKKVLIDQSILENVQLLDQIAEILTIYQDKESIINELNQLSEIINEQDKESISNLSGYNGTHRLSLKCINLVIEELWHTSRNQMEIFTYLNIKPKKIDLAKTNKIPKNMIDEFILSPVVKRTFGQAINVINKVIEKYGVPEDIIIELARESNSKDKQKFINSLQKKNETTRKRINEIIGQYGNQNAKRLVEKIRLHDEQEGKCLYSLESIPLEDLINNPQYYEVDHIIPRSVSFDNSYQNKVLVKQTENSKKSNRTPYQYFNSGETKLSYNQFKQHVLNLSKSKDRISKKKKEYLLEERDINKYEVQKEFINRNLVDTRYATRELTNYLKAYFSANDMDVKVKTINGSFTDYLRKVWKFKKERNHGYKHHAEDALIIANADFLFKENKKLKKANAILEQPSLDNGKSDATVENDNEYVETFSIPKQVNDIKEFRDFKFSHRVDKKPNRQLINDTLYSTRKIENHTFIVSPITNIYSKDNDELKKKFNKNPEKFLMYQHDPKTFEKLEVIMKQYANEKNPLAKYHEETGEYLTKYSKKNNGPIVKTIKVLGDKVGKHLDVTHKYKYSNSKIVKKTINPYRFDVYLTDKGYKFITISYLDVLKKDNYYYILKEKYEELKIKKSISDTDQFIGSFYYNDLIKINDQIFKVVGVNNDLLNRIELDLLDISYKEYCKINNIKTNRIIKGITKKITNIEKFSTDVLGNLYKAHSNHPQLIFKQRD

SEQ ID NO: 137 - protein, 1129 aa, Streptococcus sp.
  MISC_FEATURE: APG03021_RGN
MSNGKILGLDIGVASVGVGIIDAKTGNVIHANSRLFSAANAENNAERRGFRGARRLTRRKKHRVKRVRDLFEKYDISTDFRNLNLNPYELRVKGLTEQLTNEELFAALRTIAKRRGISYLDDAEDDSTGSSDYAKSIDENRRLLKTKTPGQIQLERLEKYGQLRGNFTVYDENGEAHRLINVFSTSDYKNEARKILEAQSNYNKQITDEFIEDYIEILTQKRKYYHGPGNEKSRTDYGRFRTDGTTLENIFGILIGKCSFYPEEYRASKASYTAQEFNFLNDLNNLKVPTETGKLSTEQKEYLVDFAKKSKALGASKLLKEIAKIVDCSVDDIKGYRVDNKDKPDLHTFEPYRKLKFNLSSIDIDELSRETLDKLADILTLNTEREGIEDTIKRNLPSQFTEEQISEIVQIRKNQSSAFNKGWHSFSAKLMNELIPELYVTSEEQMTILTRLEKFKVNKKSSKNTKTIDEKEITDEIYNPVVAKSVRQTIKIINAAVKKYGDFDKIVIEMPRDKNAEDEKKFIDKKEKENKKEKDDSLKRAAFLYNGTDNLPDGVFHGNKELKTKIRLWYQQGERCLYSGKLISIHDLVHNSNKFEIDHILPLSLSFDDSLANKVLVYAWTNQEKGQKTPYQVIDSMDAAWSFREMKDYVLKQKRLGKKKREYLLTTENIDKIEVKKKFIERNLVDTRYASRVVLNSLQTALKELGKDTKVSVVRGQFTSQLRRKWNIDKSRETYHHHAVDALIIAASSQLKLWQKQENPMFESYGENQVVNKETGEILSISDDKYKELVFQPPYQGFVNTISSKGFEDEILFSYQVDSKFNRKVSDATIYSTRKAKLGKDKKDETYVLGKIKDIYSQDGFDTFIKRYKKDKTQFLMYQKDPLTWENVIEVILRDYPSEKLSEDGKKTVKCNPFEEYRRENGLICKYSKKGNGTPIKSLKYYDKKLGNCIDITPEKSKNRVVLRQISPWRADIYFNLETLKYELMGLKYSDLSFEKGTGKYHISQEKYDAIREKEGIGKKSEFKFTLYRNDLILIKDTLNNCERMLRFGSKNDTSKHYVELKPLEKGTFDSEEEILPVLGKVAKSGQFIKGLNKTNISIYKVRTDVLGNKFFIKKEGDKPKLDFKNNNK

SEQ ID NO: 138 - protein, 1359 aa, Pediococcus sp.
  MISC_FEATURE: APG06015_RGN
MEKVPYNIGLDIGTSSIGFAATDNLNKPIRAKGKTVIGVRLFEEGKTAADRRGFRTTRRRLSRRKWRLRLLDEIFDKEMAKVDNTFFARLKESNLSPKDANKKYLGSLLFPEKKDFKFYEDYPTIYHLRYALMHEKRQFDIREVYLAMHHIIKYRGNFLNSAPMNSFKTQDFDFVAKFKKLNELFESIDAEHETKFDIENISKFRDIMLNQDIRKLDRKKQAAKILILDSTDKTAKKINNKIATAVANSALGYKFALDAILKLDVEESKDWSISLNDEEIDSILDNLTSDLDAERIEIIEILRDLYSHIALNEIVPNGQSLSKSMMDKYDKHHADLDVLKKVISNMDDRKKAKSLKNIYNQYVGKTNDKVLDKDEFYKQIQKNLDKSEDAMKIVNEIELDQFMPKQRTSQNGVIPHQLHQKELDEIIENQKQYYPFLAEPNPNEKRKPHAQFKLDELIAFKIPYYVGPLITKEEQQAQSGAKFAWMKRKQDGVITPWNFDEKVDRMASANEFIRRMTTKDTYLLGEDVLPDESLIYQKFKVLNELNNVKVNDKKLTVADKQDIFNDLFKKQKTVSVSKLQKYFVTEKHYLTEPTIKGLSDTKKFSNSLSTYIDFEKIFGNEILADQNKQNDLEKIIEWSTIFEDRKIFEDKLHEIEWLTEKQIKAIRRYRGWGRLSKKLLVDLRNNEGKSILDELWRTNDNFMQIQAREEFAKSIVEANQKLMNLGGAASVQNTVESTLEDAYTSPQNKKAIRQVIKVVEDIVKAVGYAPEKITIEFTRGADKNSRRTQNRQKQIMEVYKTAAKEIVDATLKGQLENEEKLTDKLYLYFTQLGKDIYSGETINIDQLNNYDIDHILPQAFIKDDSLDNRVLTSRDLNNGKSDSVPVKQFGANMKSFWMRLQAHGLISKRKLNNLMTDPDSIGKYTMQGFVRRQLVETSQVIKLTANILGAVYGENTDIVEIPAKLTHQMREKFNLYKVREVNDYHHAFDAYLTTFVGNYLFKRYPKLRPYFVYGDFKMTDNALKGMRRFNFLHDLKDDEVLVDNETGEVLWEGQKSIEELKKIYGYKFMLTTHEAYINNGAMYDQTVYPAKSNKKLIPSKNNRPTNIYGGFSGNKDAYLAIVKILGKKGDTYKVVGVPRRFSDELLNAYNDDYSEYLNKLHDVLVTQFTKKQRNKKTGKIIKKIENFEIVVGKVNYRQRIIDRNQSFMLGSSTYKYNTKQLVLTESSMKILSNFKHASDDNLNLVYDEILEKVNESFELYDKNGFRKKLNNNIDKFRKLPCKSIFEKNKLISVGKCEILFQILNGLHANATMGDLKGIGFSTPFGFMQDASGIKLNKDSMLLYQSPTGLFERKVKLSDL

SEQ ID NO: 139 - protein, 1488 aa, Weissella sp.
  MISC_FEATURE: APG09344_RGN
MAKQKYTVGLDIGTNSVGWAVINKDFKLVSGKKHINDNGKQKRSRTNLWGVRLFDAADTAADRRLKRGMRRRIARRKERLNYLRGIFQADILAFDDSFFIRMDESFLQDDDKQATAFSYRDQSGAMQTRVVTEKEAVKYPLFNGKSGSGETYTDESAYYNQYPTIYHLRQRLIDNPAQADLRLVYLAMHHILKYRGHFVNQGQTFDLGNINIAGNLTSALDKLDEASSFKFGLADVDADQANAILKNKQWSASKKAYELNTLYEIIQDTVYRRENETQAVAYDSLTVKQQEKWLAEKQKQVKAFLTGIVGNTISPKDIFANKDYDRKQNEDFPEKIKYSNENFEEQIGELEKYLDETEVAAIVAGKDVYESLVLSNILTKSTLSGSMIEKYNVHGTQLKSLKSFSRKVSAEFYDKLFNVVKDEKGKPQIGVYAQYIDGVGNPAKRLAREDFYDALKKVFESEFKGLTFPAGEKGIDFTKTDLSADRMAFIREMNEAINLENYLPKQRQADNGAIPYQVHEHELIRIIENQKQYYPFLGDKVQVTYEDESGQTQVRSEYKIQVLFKFRIPYYVGTLAKNSGWVNEDGKKLVARNVAAKNSWVVRNSDERVTPWNFEQVINKEASSINFIERMTNFDTYLPNEKVLPKNSLLYQEFIVNNELISSGYYLNGRKEYFLPEQRQRIITRLFKRYRKVSAKQMLDFLKNEYQIKLDDDPKKLFGLDTFVKVPSYNGSLSTVVDLTNKMGISEDLIANYPERFEEIIKWQTIFEDKKILKKTIREVNHNKWSGMLTAEQVNKLSKRHYTGWGRLSQKLLDGVKTSQGRTIIESLREGICDNFMRLIEDEKIAEFIANAQVAGAKDGVLAYDLVDQLPGSPAIKKGIWQSLRVLQELEHYLGRDAIGKVVIEMSRDDESSRRTKARKQQLEEFYKKFKESTGSDVTAELKRELSEKDAKEIDDEKVFLYFLQNGKSMYSGDQLYLSRLADYQVDHIVPQTYIKDDSLDNKVLVTQRDNQNKGGDTPSHTVVTRMNSYWDMLAKNGQVSPRKLANLKKGTITLKQREGFINRQLVENRQIIKHVANILTNYYTGTDTLVLTPKSGLTSQLRSGLIYELNPAFDEAKALDRGKAYQVERYTTVKLHDRFVKNRKLNDYHHAHDAYLNAFVAQYVYQEHPEWKNAWVYGKYPRNGQADFGKWATQRKQKSLQLLSSMANDVWNLEDPDTMEKTILNRDETFEQMRQTLCYRNINIVKKLETQTGKFGDESVYKKGNKADHYSLGLKRKYPPQKYGGTKGAISAVTALVKDNSGRVIPVSISASDYDSYQNASDKLAWLLMRKKNIAEILVASLPKYTKYELPSGALRLLASYQEAQSAVELPMLNLGLMDDEAKVLNLYDQLAQFIADNKLFTDKKIALLKGEMRVAFEGLEEFKDKQKVIDELLGVTNGSNQGLQALNSIGLGTSNQRLKSGNTMTNGVTLINESVTGLYSTRTTYN

SEQ ID NO: 140 - protein, 1337 aa, Enterococcus sp.
  MISC_FEATURE: APG07991_RGN
MKKDYVIGLDIGTNSVGWAVMTEDYQLVKKKMPIYGNTEKKKIKKNFWGVRLFEEGHTAEDRRLKRTARRRISRRRNRLRYLQAFFEEAMTALDENFFARLQESFLVPEDKKWHRHPIFAKLEDEVAYHETYPTIYHLRKKLADSSEQADLRLIYLALAHIVKYRGHFLIEGKLSTENISVKEQFQQFMIIYNQTFVNGESRLVSAPLPESVLIEEELTEKASRTKKSEKVLQQFPQEKANGLFGQFLKLMVGNKADFKKVFGLEEEAKITYASESYEEDLEGILAKVGDEYSDVFLAAKNVYDAVELSTILADSDKKSHAKLSSSMIVRFTEHQEDLKNFKRFIRENCPDEYDNLFKNEQKDGYAGYIAHAGKVSQLKFYQYVKKIIQDIAGAEYFLEKIAQENFLRKQRTFDNGVIPHQIHLAELQAIIHRQAAYYPFLKENQKKIEQLVTFRIPYYVGPLSKGDASTFAWLKRQSEEPIRPWNLQETVDLDQSATAFIERMTNFDTYLPSEKVLPKHSLLYEKFMVFNELTKISYTDDRGIKANFSGKEKEKIFDYLFKTRRKVKKKDIIQFYRNEYNTEIVTLSGLEEDQFNASFSTYQDLLKCGLTRAELDHPDNAEKLEDIIKILTIFEDRQRIRTQLSTFKGQFSEEVLKKLERKHYTGWGRLSKKLINGIYDKESGKTILDYLIKDDGVSKHYNRNFMQLINDSQLSFKNAIQKAQSSEHEETLSETVNELAGSPAIKKGIYQSLKIVDELVAIMGYAPKRIVVEMARENQTTSTGKRRSIQRLKIVEKAMAEIGSNLLKEQPTTNEQLRDTRLFLYYMQNGKDMYTGDELSLHRLSHYDIDHIIPQSFMKDDSLDNLVLVGSTENRGKSDDVPSKEVVKKMKAYWEKLYAAGLISQRKFQRLTKGEQGGLTLEDKAHFIQRQLVETRQITKNVAGILDQRYNAKSKEKKVQIITLKASLTSQFRSIFGLYKVREVNDYHHGQDAYLNCVVATTLLKVYPNLAPEFVYGEYPKFQAFKENKATAKAIIYTNLLRFFTEDEPRFTKDGEILWSNSYLKTIKKELNYHQMNIVKKVEVQKGGFSKESIKPKGPSNKLIPVKNGLDPQKYGGFDSPVVAYTVLFTHEKGKKPLIKQEILGITIMEKTRFEQNPILFLEEKGFLRPRVLMKLPKYTLYEFPEGRRRLLASAKEAQKGNQMVLPEHLLTLLYHAKQCLLPNQSESLAYVEQHQPEFQEILERVVDFAEVHTLAKSKVQQIVKLFEANQTADVKEIAASFIQLMQFNAMGAPSTFKFFQKDIERARYTSIKEIFDATIIYQSTTGLYETRRKVVD

SEQ ID NO: 141 - protein, 1340 aa, Enterococcus sp.
  MISC_FEATURE: APG01868_RGN
MKKEYTIGLDIGTNSVGWSVLTDDYRLVSKKMKVAGNTEKSSTKKNFWGVRLFDEGQTAEARRSKRTARRRLARRRQRILELQKIFAPEILKIDEHFFARLNESFLVPDEKKQSRHPVFATIKQEKSYHQTYPTIYHLRQALADSSEKADIRLVYLAMAHLLKYRGHFLIEGELNTENSSVTETFRQFLSTYNQQFSEAGDKQTEKLDEAVDCSFVFTEKMSKTKKAETLLKYFPHEKSNGYLSQFIKLMVGNQGNFKNVFGLEEEAKLQFSKETYEEDLQELLEKIGDDYIDLFVQAKNVYDAVLLSEILSDSTKNTRAKLSAGMIRRYDAHKEDLVLLKRFVKENLPKKYRAFFGDNSVNGYAGYIEGHATQEDFYKFVKKELTGIRGSEVFLTKIEQENFLRKQRTFDNGVIPHQIHLTELRAIIANQKKHYPFLKEEQEKLESLLTFKIPYYVGPLAKKQENSPFAWLIRKSEEKIKPWNLPEIVDMEDSAVRFIERMINTDMYMPHNKVLPKNSLLYQKFSIYNELTKVRYQDERGQMNYFSSIEKKEIFHELFEKNRKVTKKDLQEFLYLKYDIKHAELSGIEKAFNASYTTYHDFLTMSENKREMKQWLEDPELASMFEEIIKTLTVFEDREMIKTRLSHHEATLGKHIIKKLTKKHYTGWGRLSKELIQGIRDKQSNKTILDYLINDDDFPHHRNRNFMQLINDDSLSFKKEIKKAQMITDTENLEEIVKELTGSPAIKKGILQSLKIVDEIVGIMGYEPANIVVEMARENQTTGRGLKSSRPRLKALEESLKDFGSQLLKEYPTDNSSLQKDRLYLYYLQNGRDMYTGAPLDIHRLSDYDIDHIIPRSFTTDNSIDNKVLVSSKENRLKKDDVPSEKVVKKMRSFWYDLYSSKLISKRKLDNLTKIKLTEEDKAGFIKRQLVETRQITKHVAGILHHRFNKAEDTNEPIRKVRIITLKSALVSQFRNRFGIYKVREINEYHHAHDAYLNGVIALALLKKYPQLAPEFVYGEYLKFNAHKANKATVKKEFYSNIMKFFESDTPVCDENGEIFWDKSKSIAQVKKVINHHHMNIVKKTEIQKGGFSKETVEPKKDSSKLLPRKNNWDPAKYGGLGSPNVAYTVAFTYEKGKARKRTNALEGITIMEREAFEQSPVLFLKNKGYEQAEIEMKLPKYALFELENGRKRMVASNKEAQKANSFLLPEHLVTLLYHAKQYDEISHKESFDYVNEHHKEFSEVFARVLEFAGKYTLAEKNIEKLEKIYKENQTDDLAKLASSFVNLMQFNAMGAPADFKFFDVTIPRKRYTSLTEIWQSTIIHQSITGLYETRIRMGK

SEQ ID NO: 142 - protein, 1327 aa, Enterococcus sp.
  MISC_FEATURE: APG02998_RGN
MKKNYTIGLDIGTASVGWAVLTEDYDLVKRKMKISGNTQKKAVKKNFWGVRLFEQGETAEGRRLKRTTRRRIARRRQRIQYLRTIFDEAMNQVDANFFARLDESFSITDEKENERHPIFGNVAEEVAYHEQFRTIYRLREVLANSSEQADLRLIYLALAHIIKFRGHFLIEGELNTENSSVSGTFEQFIKVYNETFNVEKVLELTVDLDEIAKQKVSRMKRAELILSLFPEEKSTGDFAQFIKMIVGNQGNVKKTFSLNEDAKIQFSKEEYEENLETLLAEIGEDFRGVFDAAKSVYDAISLANILKVTDAATRAKLSSSMVARFKEHKEDLKALKQFVRDNLPDEYDDLFKNKKVAGYAGYIDGDATQEEFYKYLKKALAKTTGAEYFLAKIEQEDFLRKQRTFDNGVIPYQLHLEELKAIIRNQKPYYPFLDEEKISQLMTFRIPYYVGPLAQGQGNFAWLTRKESGKITPWNLNEKVDIEKSATDFVERMTNNDSYLPMEKVLPKHSLLYEKFTVYNELTKVRYMDDNGRVQNFSSKEKQQIVNDLFKQQRKVKKEILEAFIKNEYGIENPKVEGIEKAFNASLGTYHDLVKLGIRPALFEQPEYEQQFEQIVKILTVFEDRKMRRKQLEQFSDLLTEDEQKQLERKHYKGWGRLSAKLIHGIVDQKTQKTILDYLIDDDDLPRNRNRNFMQLINDENLSFKEEIEKIAFDNDKSTEEIVQELAGSPAIKKGILQSLKIVEEIIEIMGELPTNIVVEMARENQTTAQGNRASQARMKYLEESIKKLGSSILEDEPISKDANLLRNDRLFLYYLQNGRDMYTGDELDINNLSSYDIDHIIPQSFVKDDSIDNRVLTTQRINRGKSNTVPAESVVKDMRATWERLYASNLISKKKLNNLMKAVNGGLTEEDKAYFIQRQLVETRQITKNVAQILHQKYNNEQSSEKPVRVVTLKSALASQFRKDFSLYKIRELNDYHHAQDAYLNGVIAQALLKVYPKLEPEFVYGEYQKVSIRALNKATAKKETYSNIMKFFTNDEVLTNKETGEVLWNRQRDIKTIKKVMNYHQMNIVKKVEIQTGRFTKESIQPKGPSKKLIARKNNWAPVNYGGFDSPTVAYSVIITHEKGKAAKVVQQLVGIKILERQAFEQNEVAFLEGKGFIHPKVQLKLPKYSLYQFADGRRRLLASADEAQKGNQMVLPTELIELLYHAKHVNDSSGESLTYLENHRTKFAELLEVILQFTNRYVGAEDRQKTVRDLYEKNQDADMKELAPSFVQLLQLNKQGAPASFKFFGETIERSRYKNMTELNKATFINQSITGLYETQRRLV

1. A fusion polypeptide comprising (A) a first amino acid sequence having:
a) at least 80% sequence identity to any one of SEQ ID NOs: 1, 2, 4, 5, and 7-15;
b) at least 81% sequence identity to SEQ ID NO: 3 or 16; or
c) at least 82% sequence identity to SEQ ID NO: 6;
wherein said first amino acid sequence encodes a polypeptide that has uracil stabilizing activity and (B) a second amino acid sequence that is heterologous to the first amino acid sequence.

2. The fusion polypeptide of claim 1, wherein the first amino acid sequence comprises the sequence of any one of SEQ ID NOs: 33-39.

3.-6. (canceled)

7. A nucleic acid molecule comprising a polynucleotide sequence encoding a polypeptide comprising an amino acid sequence having:
a) at least 80% sequence identity to any one of SEQ ID NOs: 1, 2, 4, 5, and 7-15;
b) at least 81% sequence identity to SEQ ID NO: 3 or 16; or
c) at least 82% sequence identity to SEQ ID NO: 6;
wherein said polypeptide has uracil stabilizing activity; and
wherein said nucleic acid molecule further comprises a heterologous promoter operably linked to said polynucleotide sequence.

8.-11. (canceled)

12. A fusion protein comprising: (i) a DNA-binding polypeptide; (ii) a deaminase;
and (iii) at least one uracil stabilizing polypeptide (USP) having at least 80% sequence identity to any one of SEQ ID NOs: 1-16.

13. The fusion protein of claim 12, wherein the USP has the sequence of any one of SEQ ID NOs: 33-39.

14.-15. (canceled)

16. The fusion protein of claim 12, wherein the deaminase comprises an amino acid sequence having at least 80% sequence identity to any one of SEQ ID NOs: 47, 48 and 76-94.

17.-18. (canceled)

19. The fusion protein of claim 12, wherein the DNA-binding polypeptide is an RNA-guided nuclease polypeptide (RGN).

20.-21. (canceled)

22. The fusion protein of claim 19, wherein the RGN comprises an amino acid sequence having at least 80% sequence identity to any one of SEQ ID NOs: 40 and 95-142.

23. The fusion protein of claim 19, wherein the RGN is an RGN nickase.

24.-25. (canceled)

26. The fusion protein of claim 12, wherein the fusion protein further comprises at least one nuclear localization signal (NLS).

27.-48. (canceled)

49. A cell comprising the fusion protein of claim 12.

50. A cell comprising the fusion protein of claim 19, wherein the cell further comprises a guide RNA.

51.-62. (canceled)

63. A system for modifying a target DNA molecule comprising a target DNA sequence, said system comprising:
a) the fusion protein of claim 19, or a nucleotide sequence encoding said fusion protein; and
b) one or more guide RNAs capable of hybridizing to said target DNA sequence or one or more nucleotide sequences encoding the one or more guide RNAs (gRNAs);
wherein said nucleotide sequences encoding the one or more guide RNAs and encoding the fusion protein are each operably linked to a promoter heterologous to said nucleotide sequence;
and
wherein the one or more guide RNAs are capable of forming a complex with the fusion protein in order to direct said fusion protein to bind to said target DNA sequence and modify the target DNA molecule.

64. (canceled)

65. The system of claim 63, wherein the target DNA molecule is within a cell.

66.-79. (canceled)

80. The system of claim 63, wherein nucleotide sequences encoding the one or more guide RNAs and the nucleotide sequence encoding a fusion protein are located on one vector.

81.-83. (canceled)

84. A method for modifying a target DNA molecule comprising a target sequence comprising:
a) assembling an RGN-deaminase-USP ribonucleotide complex in vitro by combining:
i) one or more guide RNAs capable of hybridizing to the target DNA sequence; and
ii) the fusion protein of claim 19;
under conditions suitable for formation of the RGN-deaminase-USP ribonucleotide complex; and
b) contacting said target DNA molecule or a cell comprising said target DNA molecule with the in vitro-assembled RGN-deaminase-USP ribonucleotide complex;
wherein the one or more guide RNAs hybridize to the target DNA sequence, thereby directing said fusion protein to bind to said target DNA sequence and modification of the target DNA molecule occurs.

85. (canceled)

86. The method of claim 84, wherein said modified target DNA molecule comprises a C>T mutation of at least one nucleotide within the target DNA sequence.

87.-96. (canceled)

97. The method of claim 84, wherein the target DNA molecule is within a cell.

98.-102. (canceled)

103. The method of claim 97, further comprising selecting a cell comprising said modified DNA molecule.

104.-111. (canceled)

112. A method for producing a genetically modified cell with a correction in a causal mutation for a genetically inherited disease, the method comprising introducing into a cell the system of claim 63,
whereby the fusion protein and the one or more gRNAs of the system target to the genomic location of the causal mutation and modify the genomic sequence to remove the causal mutation.

113.-114. (canceled)

115. The method of claim 112, wherein the genome modification comprises introducing a C>T mutation of at least one nucleotide within the target DNA sequence.

116.-119. (canceled)

120. A composition comprising:
a) a fusion protein comprising: (i) a DNA-binding polypeptide; and (ii) a deaminase; or a nucleic acid molecule encoding the fusion protein; and
b) a uracil stabilizing polypeptide (USP) having at least 80% sequence identity to any one of SEQ ID NOs: 1-16; or a nucleic acid molecule encoding the USP.

121. The composition of claim 120, wherein the fusion protein further comprises a uracil stabilizing polypeptide (USP) having at least 80% sequence identity to any one of SEQ ID NOs: 1-16.

122.-138. (canceled)

139. The nucleic acid molecule of claim 7, wherein the polynucleotide sequence comprises a nucleotide sequence having at least 80% sequence identity to the nucleotide sequence set forth as SEQ ID NO: 50.

140. The fusion protein of claim 23, wherein said RGN nickase has an amino acid sequence having at least 80% sequence identity to the amino acid sequence set forth as SEQ ID NO: 41, said deaminase has an amino acid sequence having at least 80% sequence identity to the amino acid sequence set forth as SEQ ID NO: 47, and said USP has an amino acid sequence having at least 80% sequence identity to the amino acid sequence set forth as SEQ ID NO: 1.

141. The fusion protein of claim 23, wherein said RGN nickase has an amino acid sequence having at least 80% sequence identity to the amino acid sequence set forth as SEQ ID NO: 41, said deaminase has an amino acid sequence having at least 80% sequence identity to the amino acid sequence set forth as SEQ ID NO: 77, and said USP has an amino acid sequence having at least 80% sequence identity to the amino acid sequence set forth as SEQ ID NO: 1.
